(19) United States
(12) Patent Application Publication
(10) Pub. No.: US 2015/0166629 A1
(43) Pub. Date: Jun. 18, 2015

(54) SorCS1 FOR USE IN THE TREATMENT OF OBESITY AND OVERWEIGHT

(71) Applicant: Aarhus Universitet, Aarhus C (DK)

(72) Inventors: Karen-Marie Pedersen, Tjele (DK); Anders Nykjær, Risskov (DK); Mads Fuglsang Kjølby, Risskov (DK)

(21) Appl. No.: 14/390,937

(22) PCT Filed: Apr. 17, 2013
(86) PCT No.: PCT/DK2013/050107

§ 371 Date: Oct. 6, 2014

(30) Foreign Application Priority Data
Apr. 17, 2012 (DK) PA 2012 70191

(51) Int. Cl. C07K 14/705

(52) U.S. Cl. CPC C07K 14/705; A61K 38/00

(57) ABSTRACT

The present invention relates to SorCS1-like agents, including SorCS1, nucleic acid molecule encoding expression of SorCS1 and fragments thereof, as well as vectors containing said nucleic acid and to cells expressing SorCS1 and said fragments, for use in a method of reducing appetite, and/or for promoting weight loss, and/or for treating obesity, and/or for increasing metabolism, and/or for increasing thermogenesis, and/or for converting white fat into brown fat

[0001] The present application claims priority from Danish patent application no. PA 2012 70191, filed 17 Apr. 2012. All references cited in that application and in the present application are hereby incorporated by reference in their entirety.

### FIELD OF INVENTION

[0002] The present invention relates to a method of reducing appetite, suppressing hunger and/or treating obesity by administering SorCS1, preferably SorCS1 polypeptides and soluble fragments and variants thereof.

### BACKGROUND OF THE INVENTION

[0003] Obesity is a medical condition in which body fat has accumulated to an extent that it may have adverse effects on health. Clinically, obesity is defined by the World health Organization (WHO) as having a Body Mass Index (BMI) over 30. Within the obese population, three distinct sub-classes can be defined, based on the severity of obesity, ranging from class I obesity (BMI 30.0-34.9), class II obesity (BMI 35.0-39.9) and class III obesity (BMI over 40), which are also cumulative issues for public health action. It is estimated that up to 15% of all adults in Denmark suffer from obesity (BMI>30).

[0004] Adverse consequences of obesity are, a negative social image, cardiovascular disease and type 2 diabetes (Darvall et al., Eur J Vasc Endovasc Surg 2007, Haslam & James, Lancet 2005, Vernochet et al., FEBS J 2009, Yusuf et al., Lancet 2004), as well as several cancers (Roberts et al., Annu Rev Med 2009). In addition to these adverse effects, obesity is also associated with a number of other co-morbidities such as psychiatric- and neurological disorders (Beydoun et al., Obes Rev 2008, Harney et al., Pain Med 2007).

[0005] Currently, obesity is one of the most important risk factors attributing to disease-burden worldwide, and the second leading preventable cause of death (after smoking) in the US (Mokdad et al., JAMA 2004). In 2005, 1.1 billion adults and 10% of children were classified as overweight or obese (Haslam & James, Lancet 2005). In Europe, the incidence of obesity is increasing, and maybe of even more concern; childhood obesity is becoming more and more prevalent (Livingstone, Public Health Nutr 2011).

[0006] The current treatments of obesity include dietary changes, exercise and activity, behavior changes, prescription weight-loss medications and weight-loss surgery. Weight-loss drugs in sale and development include molecules intended to reduce the absorption from the gastro-intestinal (GI) tract (Orlistat), or various ways to limit food intake and suppress hunger (Phentermine, Pramlintide, Exenatide, Liraglutide). However, only Orlistat end Phentermine is approved for sale as weight loss drugs. Orlistat (Xenical) reduces intestinal fat absorption by inhibiting pancreatic lipase. Some side-effects of using Orlistat include frequent, oily bowel movements (steatorrhea). But if fat in the diet is reduced, symptoms often improve. Originally available only by prescription, it was approved by the FDA for over-the-counter sale in February 2007. Phentermine is a psychostimulant drug of the phenethylamine class, with pharmacology similar to amphetamine. It is approved as an appetite suppressant to help reduce weight in obese patients when used short-term and combined with exercise, diet, and behavioral modification. Pramlintide (Symlin) is a synthetic analogue of the hormone Amylin, which in normal people is secreted by the pancreas in response to eating. Among other effects, Amylin delays gastric emptying and promotes a feeling of satiety. Many diabetics are deficient in Amylin. Symlin is only approved to be used along with insulin by Type 1 and Type 2 diabetics. However, Symlin is currently being tested in non-diabetics as a treatment for obesity. Exenatide (Byetta) is a long-acting analogue of the hormone GLP-1, which the intestines secrete in response to the presence of food. Among other effects, GLP-1 delays gastric emptying and promotes a feeling of satiety. Some obese people are deficient in GLP-1, and dieting reduces GLP-1 further. Byetta is currently available as a treatment for type 2 diabetes. Some, but not all, patients find that they lose substantial weight when taking Byetta. However, Byetta is only approved and recommended for patients with Type 2 Diabetes. Liraglutide (Victoza) is a long-acting glucagon-like peptide-1 (GLP-1) analog. Among other effects, Victoza increase insulin secretion, delay gastric emptying, and suppress prandial glucagon secretion. Victoza is currently available as a treatment for type 2 diabetes. Some patients find that they lose substantial weight when taking Victoza. However, Victoza is only approved and recommended for patients with Type 2 Diabetes.

[0007] Weight loss surgery includes gastric bypass surgery, laparoscopic adjustable gastric banding (LAG B), gastric sleeve and biliopancreatic diversion with duodenal switch The Vps10p-domain (Vps10p-D) receptor family, comprises the receptors Sortilin, SorLA, SorCS1, SorCS2, and SorCS3. They are all type-1 transmembrane receptors sharing the characteristic structural feature of an N-terminal Vps10p-domain with high sequence identity to Vps10p, a sorting protein in yeast (10). Recent findings indicate that both Sortilin and SorLA play a crucial role as regulators of neuronal survival and death (11,12, WO 2004/056385, WO 2008/074329). Interestingly, Sortilin has also been associated with insulin-regulated glucose up-take as it may facilitate translocation of the glucose transporter GLUT4 from an intracellular compartment to the plasma membrane (13,14, WO 2010/142296).

[0008] SorCS1 is a receptor that, among other tissues, is expressed in the brain, pancreas, fatty tissue and muscles. Genetic studies have shown that polymorphisms in the SORCS1 gene in humans (Nat Genet. 2006 June; 38(6):688-93), rats (Genetics. 2006 November; 174(3):1565-72) and mice (Diabetes. 2007 July; 56(7):1922-9) are associated to risk of development of type-2 diabetes.

[0009] SorCS1 is unique among the Vps10p-D receptors as it exists in several distinct splice variants, denoted SorCS1-a, b, c, c+, and d, that encode identical extracellular and transmembrane parts, and cytoplasmic domains that differ in length and sequence (10, 11). It has been demonstrated that SorCS1, in addition to in the nervous system, is expressed in adipose tissue, skeletal muscle and (3-cells of the pancreas (WO 2010/142296).

[0010] It has also been demonstrated (WO 2010/142296) that SorCS1 can bind to the insulin receptor (IR) and stabilize its expression in muscle- and adipose tissue, hereby ensuring the ability to respond to insulin. To support this notion, treatment with the extracellular domain of SorCS1 (soluble SorCS1) results in a marked reduction in both plasma glucose and insulin levels in db/db mice (obesity dependent type-2 diabetic mice).

### SUMMARY OF THE INVENTION

[0011] SorCS1 is one of five members of the mammalian Vps10p-domain (Vps10p-D) receptor family, which also comprises Sortilin, SorLA, SorCS2, and SorCS3. SorCS1 is unique among the Vps10p-D receptors as it exists in several distinct splice variants.

[0012] The present inventors have found that administration of SorCS1, and in particular the extracellular domain of a SorCS1 polypeptide (soluble SorCS1 or sSorCS1) to a subject results in a significant weight reduction in the treated subjects.

[0013] It is thus an object of the present invention to provide methods and agents capable of reducing appetite, and/or suppressing hunger, and/or increasing the suppression of hunger, and/or increasing the reduction of prospective consumption and/or increasing the reduction of appetite, and/or increasing satiety, and/or treating obesity, and/or promoting weight loss, and/or increasing metabolism, and/or transforming white fat into brown fat. The latter results in increased thermogenesis of the subject receiving SorCS1 therapy. Thus the invention also concern a method of increasing thermogenesis in a subject.

[0014] Consequently in a main aspect the present invention relates to an agent selected from the group consisting of:
[0015] a) an isolated polypeptide comprising:
   [0016] i) the amino acid sequence of SEQ ID NOs: 15; or
   [0017] ii) a biologically active sequence variant of the amino acid sequence of i) wherein the variant has at least 60% sequence identity to said SEQ ID NO: 15,
   [0018] iii) a biologically active fragment of at least 15 contiguous amino acids of any one of i) through ii), said fragment having at least 60% sequence identity to SEQ ID NO: 15 in a range of overlap of at least 15 amino acids,
[0019] b) a nucleic acid sequence encoding a polypeptide as defined in a);
[0020] c) a vector comprising the nucleic acid molecule as defined in b),
[0021] d) an isolated host cell transformed or transduced with the nucleic acid of b) or the vector of c),
   for use in a method for reducing appetite, and/or for promoting weight loss, and/or treating obesity, and/or increasing metabolism, and/or increasing thermogenesis, and/or converting white fat into brown fat.

[0022] The agent of the invention may be formulated in a manner suitable for delivery to a subject. Thus in one aspect the invention concerns a pharmaceutical composition comprising the agent defined herein above. In one aspect the invention concerns a kit comprising said pharmaceutical composition, and instructions for use such as instructions for administration to a subject.

### DETAILED DESCRIPTION OF THE INVENTION

### Definitions

[0023] Unless specifically indicated otherwise, all technical and scientific terms used herein have the same meaning as commonly understood by those of ordinary skill in the art to which this invention belongs. For purposes of the present invention, the following terms are defined.

Acylation: The term “acylation” or “acylation group” as used herein means an R—(C═O)-group, wherein R is selected from straight-chain or branched, saturated or unsaturated carbon chains, optionally comprising one or more O, N, S, or P, such as a straight-chain or branched alkane carboxylic acid. Various examples of suitable acylation groups are described in WO2006/037810, WO00/34331, WO2006/097537, WO2011/080103. In particular examples of suitable acylation groups have the structure CH3(CH2)ₙCO—, wherein n is 4 to 40, e.g. 8 to 22, such as an acylation group selected from the group comprising:
CH₃(CH2)₈CO—, CH₃(CH₂)₉CO—, CH₃(CH₂)₁₀CO—, CH₃(CH₂)₁₁CO—, CH₃(CH₂)₁₂CO—, CH₃(CH₂)₁₃CO—, CH₃(CH₂)₁₄CO—, CH₃(CH₂)₁₅CO—, CH₃(CH₂)₁₆CO—, CH₃(CH₂)₁₇CO—, CH₃(CH₂)₁₈CO—, CH₃(CH₂)₁₉CO—, CH₃(CH₂)₂₀CO—, CH₃(CH₂)₂₁CO— and CH₃(CH₂)₂₂CO—. Further examples of suitable acylation groups has the structure HOOC—(CH₂)ₙCO—, wherein n is 4 to 40, e.g. 12 to 20, typically, HOOC—(CH₂)₁₄CO—, HOOC—(CH₂)₁₅CO—, HOOC—(CH₂)₁₆CO—, HOOC—(CH₂)₁₇CO— and HOOC—(CH₂)₁₈CO—. See also U.S. Pat. No. 5,905,140 for further examples of acylation groups.
Adjuvant: Any substance whose admixture with an administered immunogenic determinant/antigen increases or otherwise modifies the immune response to said determinant.
Affinity: The interaction of most ligands with their binding sites can be characterized in terms of a binding affinity. In general, high affinity ligand binding results from greater intermolecular force between the ligand and its receptor while low affinity ligand binding involves less intermolecular force between the ligand and its receptor. In general, high affinity binding involves a longer residence time for the ligand at its receptor binding site than is the case for low affinity binding. High affinity binding of ligands to receptors is often physiologically important when some of the binding energy can be used to cause a conformational change in the receptor, resulting in altered behavior of an associated ion channel or enzyme.

[0024] A ligand that can bind to a receptor, alter the function of the receptor and trigger a physiological response is called an agonist for that receptor. Agonist binding to a receptor can be characterized both in terms of how much physiological response can be triggered and the concentration of the agonist that is required to produce the physiological response. High affinity ligand binding implies that a relatively low concentration of a ligand is adequate to maximally occupy a ligand binding site and trigger a physiological response. Low affinity binding implies that a relatively high concentration of a ligand is required before the binding site is maximally occupied and the maximum physiological response to the ligand is achieved. Ligand binding is often characterized in terms of the concentration of ligand at which half of the receptor binding sites are occupied, known as the dissociation constant (k_{d}). Affinity is also the strength of binding between receptors and their ligands, for example between an antibody and its antigen.

Agonist: An agonist is a compound capable of increasing or effecting the activity of a receptor. Specifically, a Vps10p-domain receptor agonist is a compound capable of binding to one or more of binding sites of a Vps10p-domain receptor thereby inducing the same physiological response as a given endogenous agonist ligand compound.
Antagonist: An antagonist is in this case synonymous with an inhibitor. An antagonist is a compound capable of decreasing the activity of an effector such as a receptor. Specifically, a Vps10p-domain receptor antagonist is a compound capable of binding to one or more of binding sites of Vps10p-domain receptor thereby inhibiting binding of another ligand thus inhibiting a physiological response.
Antibody: The term “antibody” as referred to herein includes whole antibodies and any antigen binding fragment (i.e., “antigen-binding portion”) or single chain thereof.
Polyclonal antibody: Polyclonal antibodies are a mixture of antibody molecules recognising a specific given antigen, hence polyclonal antibodies may recognise different epitopes within said antigen.
Aromatic group: the term “aromatic group” or “aryl group” means a mono- or polycyclic aromatic hydrocarbon group.
Binding site: The term “binding site” or “binding pocket”, as used herein, refers to a region of a molecule or molecular complex that, as a result of its shape, favourably associates with another molecule, molecular complex, chemical entity or compound. As used herein, the pocket comprises at least a deep cavity and, optionally a shallow cavity.
Bioreactive agent or biologically active or biological activity: The terms as used herein refers to effect of any compound or substance which may be used in connection with an application that is therapeutic or otherwise useful according to this invention.
Electrostatic interaction: The term “electrostatic interaction” as used herein refers to any interaction occurring between charged components, molecules or ions, due to attractive forces when components of opposite electric charge are attracted to each other. Examples include, but are not limited to: ionic interactions, covalent interactions, interactions between a ion and a dipole (ion and polar molecule), interactions between two dipoles (partial charges of polar molecules), hydrogen bonds and London dispersion bonds (induced dipoles of polarizable molecules). Thus, for example, “ionic interaction” or “electrostatic interaction” refers to the attraction between a first, positively charged molecule and a second, negatively charged molecule. Ionic or electrostatic interactions include, for example, the attraction between a negatively charged bioactive agent.
Fc fragment: The term “an Fc fragment of a mammalian antibody” as used herein means a constant region, i.e. Fc fragment of a mammalian antibody or a fragment thereof wherein such mammalian antibody may be selected from IgM, IgG, IgA, IgD and IgE from a mammal, such as a primate, e.g. human, abe, or monkey; an equine, e.g. horse. A typical Fc fragment of a mammalian antibody is a recombinant Fc fragment of a human antibody, such as a recombinant Fc fragment of a human IgG antibody.

[0025] In the present context, the term “a variant of an Fc fragment of a mammalian antibody” or “Fc variant” (used interchangeably throughout the present description) as used herein means the Fc fragment of a mammalian antibody, wherein one or more amino acid residues, such as 1-10 amino acid residues, of the Fc fragment have been substituted by other amino acid residues and/or wherein one or more amino acid residues, such as 1-10 amino acid residues, have been deleted from the Fc fragment and/or wherein one or more amino acid residues, such as 1-10 amino acid residues, have been added to the Fc fragment and/or wherein one or more amino acid residues, such as 1-10 amino acid residues, in the Fc fragment have been modified. Such addition or deletion of amino acid residues can take e.g. place at the N-terminal of the Fc fragment and/or at the C-terminal of the Fc fragment. Native refers to an Fc that has not been modified by a human. WO 96/32478 describes exemplary Fc variants. Thus, the term “Fc variant” in one embodiment comprises a molecule or sequence that is humanized from a non-human native Fc. Furthermore, a native Fc comprises sites that may be removed because they provide structural features or biological activity that are not required for the fusion molecules of the present invention.

Fragments: The polypeptide fragments according to the present invention, including any functional equivalents thereof, may in one embodiment comprise less than 500 amino acid residues, such as less than 450 amino acid residues, for example less than 400 amino acid residues, such as less than 350 amino acid residues, for example less than 300 amino acid residues, for example less than 250 amino acid residues, such as less than 240 amino acid residues, for example less than 225 amino acid residues, such as less than 200 amino acid residues, for example less than 180 amino acid residues, such as less than 160 amino acid residues, for example less than 150 amino acid residues, such as less than 140 amino acid residues, for example less than 130 amino acid residues, such as less than 120 amino acid residues, for example less than 110 amino acid residues, such as less than 100 amino acid residues, for example less than 90 amino acid residues, such as less than 85 amino acid residues, for example less than 80 amino acid residues, such as less than 75 amino acid residues, for example less than 70 amino acid residues, such as less than 65 amino acid residues, for example less than 60 amino acid residues, such as less than 55 amino acid residues, for example less than 50 amino acid residues, such as less than 45 amino acid residues, for example less than 40 amino acid residues, such as 35 amino acid residues, for example 30 amino acid residues, such as 25 amino acid residues, such as 20 amino acid residues, for example 15 amino acid residues, such as 10 amino acid residues, for example 5 contiguous amino acid residues of an amino acid sequence selected from the group consisting of SEQ ID NOs: 1, 2, 3, 4, 5, 6, 7, 8, 9, 10, 11, 12, 13, 14, 15, 16, 17, 18, 19, 20, 21, 22, 23, 24, 25, 26, 27, 28, 29, 30, 31, 32, 33, 34, 35, 36, 37, 38, 39, 40, 41, 42, 43, 44, 45, 46, 47, 48, 49, 50, 51, 52, 53, 54, 55, 56, 57, 58, 59, 60, 61, 62, 63 and 64 or a variant thereof being at least 70% (e.g. at least 85%, 90%, 95%, 97%, 98%, or 99%) identical to said sequences. Also, the polypeptide fragments according to the present invention, including any functional equivalents thereof, may in one embodiment comprise more than 5 amino acid residues, such as more than 10 amino acid residues, for example more than 15 amino acid residues, such as more than 20 amino acid residues, for example more than 25 amino acid residues, for example more than 50 amino acid residues, such as more than 75 amino acid residues, for example more than 100 amino acid residues, such as more than 125 amino acid residues, for example more than 150 amino acid residues, such as more than 175 amino acid residues, for example more than 200 amino acid residues, such as more than 225 amino acid residues, for example more than 250 amino acid residues, such as more than 275 amino acid residues, for example more than 300 amino acid residues, such as more than 325 amino acid residues, for example more than 350 amino acid residues, such as more than 375 amino acid residues, for example more than 400 amino acid residues, such as more than 425 amino acid residues, for example more than 450 amino acid residues, such as more than 475 amino acid residues, for example more than 500 amino acid residues, such as more than 525 amino acid residues, for example more than 550 amino acid residues, such as more than 575 amino acid residues, for example more than 600 amino acid residues, such as 625 amino acid residues, for example 650 amino acid residues, such as 675 amino acid residues, such as 700 amino acid residues of an amino acid sequence selected from the group consisting of SEQ ID NOs: 1, 2, 3, 4, 5, 6, 7, 8, 9, 10, 11, 12, 13, 14, 15, 16, 17, 18, 19, 20, 21, 22, 23, 24, 25, 26, 27, 28, 29, 30, 31, 32, 33, 34, 35, 36, 37, 38, 39, 40, 41, 42, 43, 44, 45, 46, 47, 48, 49, 50, 51, 52, 53, 54, 55, 56, 57, 58, 59, 60, 61, 62, 63 and 64 or a variant thereof being at least 60% (e.g. at least 65%, 70%, 80%, 85%, 90%, 95%, 97%, 98%, or at least 99%) identical to said sequences. Examples of active fragments include one or more of the following: SEQ ID NO: 1 aa 103-124, SEQ ID NO: 1 aa 125-143, SEQ ID NO: 1 aa 144-162, SEQ ID NO: 1 aa 197-218, SEQ ID NO: 1 aa 391-409, SEQ ID NO: 1 aa 661-684, SEQ ID NO: 1 aa 763-783, or SEQ ID NO: 1 aa 859-876. The fragments may be from 5 to 500 amino acids in length, for example, 5 to 400, 10 to 300, 20 to 250, 15 to 50, 5 to 15, 7 to 15, 10 to 25, 10 to 20, and 7 to 25 amino acids in length.
Functional equivalency: “Functional equivalency” as used in the present invention is, according to one preferred embodiment, established by means of reference to the corresponding functionality of a predetermined fragment of the sequence.

[0026] Functional equivalents or variants of a SorCS1 polypeptide, or a fragment thereof will be understood to exhibit amino acid sequences gradually differing from the preferred predetermined SorCS1 polypeptide or the SorCS1 fragment sequence respectively, as the number and scope of insertions, deletions and substitutions including conservative substitutions increase, while retaining the biological activity of a SorCS1 polypeptide in this context. This difference is measured as a reduction in identity between the preferred predetermined sequence and the fragment or functional equivalent.

[0027] A functional variant obtained by substitution of one or more amino acid residues may well exhibit some form or degree of native SorCS1 activity, and yet be less homologous, if residues containing functionally similar amino acid side chains are substituted. Functionally similar in this respect refers to dominant characteristics of the side chains such as hydrophobic, basic, neutral or acidic, or the presence or absence of steric bulk. Accordingly, in one embodiment of the invention, the degree of identity is not a principal measure of a fragment being a variant or functional equivalent of a preferred predetermined fragment according to the present invention.

[0028] In addition to conservative substitutions introduced into any position of a preferred predetermined SorCS1 polypeptide, or a fragment thereof, it may also be desirable to introduce non-conservative substitutions in any one or more positions of such a SorCS1 polypeptide, or a fragment thereof.

[0029] A non-conservative substitution leading to the formation of a functionally equivalent fragment of a SorCS1 polypeptide, or a fragment thereof would for example i) differ substantially in polarity, for example a residue with a non-polar side chain (Ala, Leu, Pro, Trp, Val, Ile, Leu, Phe or Met) substituted for a residue with a polar side chain such as Gly, Ser, Thr, Cys, Tyr, Asn, or Gln or a charged amino acid such as Asp, Glu, Arg, or Lys, or substituting a charged or a polar residue for a non-polar one; and/or ii) differ substantially in its effect on polypeptide backbone orientation such as substitution of or for Pro or Gly by another residue; and/or iii) differ substantially in electric charge, for example substitution of a negatively charged residue such as Glu or Asp for a positively charged residue such as Lys, His or Arg (and vice versa); and/or iv) differ substantially in steric bulk, for example substitution of a bulky residue such as His, Trp, Phe or Tyr for one having a minor side chain, e.g. Ala, Gly or Ser (and vice versa).

[0030] Variants obtained by substitution of amino acids may in one preferred embodiment be made based upon the hydrophobicity and hydrophilicity values and the relative similarity of the amino acid side-chain substituents, including charge, size, and the like. Exemplary amino acid substitutions which take various of the foregoing characteristics into consideration are well known to those of skill in the art and include: arginine and lysine; glutamate and aspartate; serine and threonine; glutamine and asparagine; and valine, leucine and isoleucine.

[0031] Mutagenesis of a preferred predetermined SorCS1 polypeptide, or a fragment thereof, can be conducted by making amino acid insertions, usually on the order of about from 1 to 10 amino acid residues, preferably from about 1 to 5 amino acid residues, or deletions of from about from 1 to 10 residues, such as from about 2 to 5 residues.

[0032] In one embodiment the ligand of binding site 1, 2 or 3 is an oligopeptide synthesised by automated synthesis. Any of the commercially available solid-phase techniques may be employed, such as the Merrifield solid phase synthesis method, in which amino acids are sequentially added to a growing amino acid chain (see Merrifield, J. Am. Chem. Soc. 85:2149-2146, 1963).

[0033] Equipment for automated synthesis of polypeptides is commercially available from suppliers such as Applied Biosystems, Inc. of Foster City, Calif., and may generally be operated according to the manufacturer's instructions. Solid phase synthesis will enable the incorporation of desirable amino acid substitutions into any fragment of SorCS1 according to the present invention. It will be understood that substitutions, deletions, insertions or any subcombination thereof may be combined to arrive at a final sequence of a functional equivalent. Insertions shall be understood to include amino-terminal and/or carboxyl-terminal fusions, e.g. with a hydrophobic or immunogenic protein or a carrier such as any polypeptide or scaffold structure capable as serving as a carrier.

[0034] Oligomers including dimers including homodimers and heterodimers of fragments of sortilin inhibitors according to the invention are also provided and fall under the scope of the invention. SorCS1 polypeptides and fragments, functional equivalents and variants thereof can be produced as homodimers or heterodimers with other amino acid sequences or with native sortilin inhibitor sequences. Heterodimers include dimers containing immunoreactive sortilin inhibiting fragments as well as sortilin inhibiting fragments that need not have or exert any biological activity.

[0035] SorCS1 polypeptides, or fragments and variants thereof may be synthesised both in vitro and in vivo. Methods for in vitro synthesis are well known, and methods being suitable or suitably adaptable to the synthesis in vivo of sortilin inhibitors are also described in the prior art. When synthesized in vivo, a host cell is transformed with vectors containing DNA encoding a sortilin peptide inhibitor or a fragment thereof. A vector is defined as a replicable nucleic acid construct. Vectors are used to mediate expression of SorCS1 polypeptides, and/or fragments and variants. An expression vector is a replicable DNA construct in which a nucleic acid sequence encoding the predetermined sortilin inhibiting fragment, or any functional equivalent thereof that can be expressed in vivo, is operably linked to suitable control sequences capable of effecting the expression of the fragment or equivalent in a suitable host. Such control sequences are well known in the art. Both prokaryotic and eukaryotic cells may be used for synthesising ligands.

[0036] Cultures of cells derived from multicellular organisms however represent preferred host cells. In principle, any higher eukaryotic cell culture is workable, whether from vertebrate or invertebrate culture. Examples of useful host cell lines are VERO and HeLa cells, Chinese hamster ovary (CHO) cell lines, and W138, BHK, COS-7, 293 and MDCK cell lines. Preferred host cells are eukaryotic cells known to synthesize endogenous sortilin inhibitors. Cultures of such host cells may be isolated and used as a source of the fragment, or used in therapeutic methods of treatment, including therapeutic methods aimed at promoting or inhibiting a growth state, or diagnostic methods carried out on the human or animal body.

In vitro/in vivo: the terms are used in their normal meaning.
Ligand: a substance, compound or biomolecule such as a protein including receptors, that is able to bind to and form a complex with (a second) biomolecule to serve a biological purpose. In a narrower sense, it is a signal triggering molecule binding to a site on a target protein, by intermolecular forces such as ionic bonds, hydrogen bonds and Van der Waals forces. The docking (association) is usually reversible (dissociation). Actual irreversible covalent binding between a ligand and its target molecule is rare in biological systems. As opposed to the meaning in metalorganic and inorganic chemistry, it is irrelevant, whether or not the ligand actually binds at a metal site, as it is the case in hemoglobin. Ligand binding to receptors may alter the chemical conformation, i.e. the three dimensional shape of the receptor protein. The conformational state of a receptor protein determines the functional state of a receptor. The tendency or strength of binding is called affinity. Ligands include substrates, inhibitors, activators, non-self receptors, co-receptors and neurotransmitters.
Linker: The term “linker” as used herein means a valence bond or multifunctional moiety, such as a bifunctional moiety that separates the SorCS1 agent and the pharmaceutically acceptable molecule conjugated to SorCS1 and resulting in increased half-life such as increased plasma half-life.
Polymer: The term “polymer” as used herein means a molecule formed by covalent linkage of two or more monomers, wherein none of the monomers is an amino acid residue, except where the polymer is human albumin or another abundant plasma protein. The term “polymer” may be used interchangeably with the term “polymer molecule”. The term is intended to cover carbohydrate molecules attached by in vitro glycosylation. Carbohydrate molecules attached by in vivo glycosylation, such as N- or O-glycosylation (as further described below) are referred to herein as “an oligosaccharide moiety”. Except where the number of polymer molecules is expressly indicated, every reference to “a polymer”, “a polymer molecule”, “the polymer” or “the polymer molecule” as used in the present invention shall be a reference to one or more polymer molecule(s). The polymer may be a water soluble or water insoluble polymer, such as a PEG moiety. The PEG moiety may have an average size selected from the range of 500 Da to 200.000 Da, such as from 500 Da to 100.000 Da, such as from 2000 Da to 50.000 Da. Such PEG molecules may be retrieved from i.a. Shearwater Inc.
Pharmaceutical agent: The terms “pharmaceutical agent” or “drug” or “medicament” refer to any therapeutic or prophylactic use of an agent according to the invention, which agent may be used in the treatment (including the prevention, diagnosis, alleviation, or cure) of a malady, affliction, condition, disease or injury in a patient. Therapeutically useful genetic determinants, peptides, polypeptides and polynucleotides may be included within the meaning of the term pharmaceutical or drug. As defined herein, a “therapeutic agent”, “pharmaceutical agent” or “drug” or “medicament” is a type of bioactive agent.
Pharmaceutical composition: or drug, medicament or agent refers to any chemical or biological material, compound, or composition capable of inducing a desired therapeutic effect when properly administered to a patient. Some drugs are sold in an inactive form that is converted in vivo into a metabolite with pharmaceutical activity. For purposes of the present invention, the terms “pharmaceutical composition” and “medicament” preferably encompass an active agent as such or an inactive drug and the active metabolite.
Purified antibody: The term a “purified antibody” is an antibody at least 60 weight percent of which is free from the polypeptides and naturally-occurring organic molecules with which it is naturally associated. Preferably, the preparation comprises antibody in an amount of at least 75 weight percent, more preferably at least 90 weight percent, and most preferably at least 99 weight percent.
Sequence identity: The term “sequence identity” or “identical” as used herein refers to a relationship between the sequences of two or more proteins, as determined by comparing the sequences. The determination of percent identity between two sequences can be accomplished using a mathematical algorithm. A preferred, non-limiting example of a mathematical algorithm utilized for the comparison of two sequences is the algorithm of Karlin and Altschul (1990) Proc. Natl. Acad. Sci. USA 87:2264-2268, modified as in Karlin and Altschul (1993) Proc. Natl. Acad. Sci. USA 90:5873-5877. Such an algorithm is incorporated into the BLASTN and BLASTP programs of Altschul, et al. (1990) J. Mol. Biol. 215:403-410.

[0037] In order to characterize the identity, subject sequences are aligned so that the highest order homology (match) is obtained. Based on these general principles, the “percent identity” of two nucleic acid sequences may be determined using the BLASTN algorithm [Tatiana A. Tatusova, Thomas L. Madden: Blast 2 sequences—a new tool for comparing protein and nucleotide sequences; FEMS Microbiol. Lett. 1999 174 247-250], which is available from the National Center for Biotechnology Information (NCBI) web site (http://www.ncbi.nlm.nih.gov), and using the default settings suggested here (i.e. Reward for a match=1; Penalty for a mismatch=−2; Strand option=both strands; Open gap=5; Extension gap=2; Penalties gap x_dropoff=50; Expect=10; Word size=11; Filter on). The BLASTN algorithm determines the % sequence identity in a range of overlap between two aligned nucleotide sequences.

[0038] Another preferred, non-limiting example of a mathematical algorithm utilized for the comparison of sequences is the CLUSTAL W (1.7) alignment algorithm (Thompson, J. D., Higgins, D. G. and Gibson, T. J. (1994) CLUSTAL W: improving the sensitivity of progressive multiple sequence alignment through sequence weighting, positions-specific gap penalties and weight matrix choice. Nucleic Acids Research, 22:4673-4680.). CLUSTAL W can be used for multiple sequence alignment preferably using BLOSUM 62 as scoring matrix. When calculating sequence identities, CLUSTAL W includes any gaps made by the alignment in the length of the reference sequence.

[0039] Sequence identities are calculated by dividing the number of Matches by the length of the aligned sequences with gaps.

[0040] A high level of sequence identity indicates likelihood that the first sequence is derived from the second sequence. Amino acid sequence identity requires identical amino acid sequences between two aligned sequences. Thus, a candidate sequence sharing 70% amino acid identity with a reference sequence, requires that, following alignment, 70% of the amino acids in the candidate sequence are identical to the corresponding amino acids in the reference sequence.

Treatment: The term “treatment” as used herein refers to a method involving therapy including surgery of a clinical condition in an individual including a human or animal body. The therapy may be ameliorating, curative or prophylactic, i.e. reducing mental and behavioural symptoms.
Variants: The term “variants” as used herein refers to amino acid sequence variants said variants preferably having at least 60% identity, for example at least 63% identity, such as at least 66% identity, for example at least 70% sequence identity, fear example at least 72% sequence identity, for example at least 75% sequence identity, for example at least 80% sequence identity, such as at least 85% sequence identity, for example at least 90% sequence identity, such as at least 91% sequence identity, for example at least 91% sequence identity, such as at least 92% sequence identity, for example at least 93% sequence identity, such as at least 94% sequence identity, for example at least 95% sequence identity, such as at least 96% sequence identity, for example at least 97% sequence identity, such as at least 98% sequence identity, for example 99% sequence identity with any of the predetermined sequences.
Up-regulation of expression: a process leading to increased expression of genes, preferably of endogenous genes.

### DESCRIPTION OF THE DRAWINGS

[0041] FIG. 1: Alignment of SorCS1

[0042] Sequence alignment of SorCS1 from Human (homo sapiens), Chimpanzee (Pan troglodytes), Cow (Bos Taurus), Mouse (Mus musculus), Rat (Rattus norvegicus), Dog (Canis lupus familiaris) and Chicken (Gallus gallus) origin. The sequence identity is as demonstrated in table 2.

TABLE 2
Sequence identity to human SorCS1

| | Protein | DNA |
|---|---|---|
| Species | (% identity) | (% identity) |
| Human | 100 | 100 |
| Chimpanzee | 99.6 | 99.4 |
| Dog | 97.6 | 92.5 |
| Cow | 92.9 | 89.8 |
| Mouse | 93.2 | 87.7 |
| Rat | 93.2 | 88.0 |
| Chicken | 85.3 | 79.7 |

[0043] FIG. 2: Gene expression profiling of adipose tissue from SorCS1 knockout mice by PCR arrays.

[0044] Using gene array analysis of adipose tissue from SorCS1 knockout wild-type adipose mice the inventors tested expression of A) 84 genes related to the mouse insulin signalling pathway and B) 84 genes related to mouse lipoprotein signalling & cholesterol metabolism. In practice, first strand cDNA was synthesized from total RNA (Applied Biosystems) from SorCS1 knockout (−/−) and wild-type (+/+) adipose tissue from female mice 50 weeks of age (n=3). Then superarray of A) Mouse Insulin Signalling Pathway (PAMM-030A RT2 Profiler PCR arrays) or B) the type Mouse Lipoprotein Signalling & Cholesterol Metabolism (PAMM-080-A RT2 Profiler PCR arrays) were processed using an ABI7900 platform (Applied Biosystems) and SYBR Green/Rox PCR (SABiosciences). AROS Applied Biotechnology, Aarhus, Denmark, did the expression analyses. Genes showing an expression more than 3 times up- or down-regulated in the SorCS1 knockout mice when compared to wild-type mice are listed in the upper tables and their known functions are indicated in the table below. Several genes in A and B show changed expression in the SorCS1 knockout mice compared to the wild-type mice indicating that insulin and cholesterol signalling pathways and metabolism are altered in SorCS1 knockout mice.

[0045] FIG. 3: Reduced weight in diabetic db/db mice after over-expression of soluble SorCS1.

[0046] To evaluate the effect of soluble SorCS1 on weight in an obese mouse model that spontaneously develops type 2 diabetes, we used the db/db mouse strain (BKS.Cg-m+/+Lpr^{db}/BomTac from Taconic). These mice lack the leptin receptor and consequently the mice become obese and develop insulin resistance and finally severe diabetes at the age of 6-8 weeks. The inventors injected adenovirus expressing either human soluble (hsol.) SorCS1 or LacZ as a control (as described in example 2), to examine the effect on weight. In detail, db/db female mice 6 weeks of age were injected in the tail vein with 2E9 pfu's of an adenoviral vector with either hsol.SorCS1 or LacZ (from ViraQuest Inc, North Liberty, Iowa) as a negative control virus. In the morning, on day 0, 9, 14 and day 16, the mice were weighed on a scale. Data are means±SEM for 5 mice in each group. On day 9 to 16, the db/db female mice with over-expression of soluble SorCS1 exhibited a significant decrease in weight compared to the mice that received the control LacZ virus. Thus, over-expression of soluble SorCS1 improves the obese status in this obese mouse model.

[0047] FIG. 4: Reduced food intake and weight in diabetic db/db mice after over-expression of soluble SorCS1.

[0048] To evaluate the effect of soluble SorCS1 on body weight in an obese mouse model that spontaneously develops type 2 diabetes, the inventors used the db/db mouse strain (BKS.Cg-m+/+Lpr^{db}/BomTac from Taconic). These mice lack the leptin receptor and consequently the mice become obese and develop insulin resistance and finally severe diabetes at the age of 6-8 weeks. The inventors injected adenovirus expressing either hsol.SorCS1 or LacZ as a control (as described in example 2), to examine the effect on weight. In detail, db/db female mice 6 weeks of age were injected in the tail vein with 2E9 pfu's of an adenoviral vector with either hsol.SorCS1 or LacZ (from ViraQuest Inc, North Liberty, Iowa) as a negative control virus. A) In the morning of day 9 after virus treatment each mouse was moved to a metabolic cage with a measured amount of food. 24 hours later the mouse was moved back to a normal mouse cage and the food in the metabolic cage was weighed to determine the food intake. The amount of ingested food over 24 hours is shown. Data are means±SEM for 4 mice in each group. Mice with over-expression of soluble SorCS1 ate significant less than the control mice expressing LacZ. B) In the morning, on day 0 and 11 after virus treatment, the mice were weighed on a scale. The relative weight changes over the time period are shown. Data are means±SEM for 4 mice in each group. On day 11, the db/db female mice with over-expression of soluble SorCS1 exhibited a significant decrease in body weight compared to the mice that received the control LacZ virus.

[0049] FIG. 5: Reduced food intake and weight in obese DIO male mice after over-expression of soluble SorCS1.

[0050] Obese and pre-diabetic “diet induced obesity” (D10) male mice 15 weeks of age were injected i.v with adenovirus encoding the soluble extra-cellular domain of SorCS1 or LacZ (control). A) At day 10 each group of virus treated mice were placed in cages and the food intake over the next 4 days was measured every 24 hrs. Mice with over-expression of soluble SorCS1 ingested significantly less than the control mice expressing LacZ, both 11 and 14 days after virus injection. B) At day 0, 11 and 14 after virus treatment the mice were weighed. The relative weight changes over the time period are shown. In conclusion over-expression of soluble SorCS1 leads to a significant weight reduction compared to the lacZ control (P<0.05 SorCS1 vs LacZ).

[0051] FIG. 6: Reduced food intake and weight in obese and diabetic ob/ob female mice after over-expression of soluble SorCS1.

[0052] Obese ob/ob mice 8 weeks of age, with spontaneous type-2 diabetes, were injected i.v with adenovirus encoding the soluble extra-cellular domain of SorCS1 or LacZ (control). A) At day 9 the mice were placed in metabolic cages and the food intake over the next 24 hrs was measured. Mice with over-expression of soluble SorCS1 ate significant less than the control mice expressing LacZ. B) At day 0 and 10 after virus treatment the mice are weight. The relative weight changes over the time period are shown. In conclusion over-expression of soluble SorCS1 leads to a significant weight reduction.

[0053] FIG. 7. Overexpression of human soluble SorCS1 by adenovirus increase expression of PRDM16 and PGC-1alpha in adipose tissue from db/db mice. Db/db mice were i.v. injected with 2E9 PFU/mouse of either AV-hsol.sorcs1 or AV-LacZ and gonadal fat was harvested 14 days post injection. After isolation of mRNA from the gonadal fat, a qPCR of specific fat genes was performed for CD137 (brite adipose tissue marker), PRDM16 and PGC-1α (brown adipose tissue markers), and GAPDH as a household gene. Several proteins are involved in the process of converting WAT to BAT in mice, e.g. PRDM16 and PGC-1 alpha. PRDM16 is selectively expressed in BAT, where it activates BAT-specific gene expression and represses WAT-specific gene expression, through an interaction with the co-receptor PGC-1alpha. mRNA from PRDM16 and PGC-1alpha are more than 2-fold upregulated in the adipose tissue from db/db mice subjected to AV-hsol.sorcs1 virus, p<0.05 (student's t-test, 2 tailed, 2 sample, equal variance).

[0054] FIG. 8. Less weight gain in animals, on normal chow (ND), treated with human soluble SorCS1 expressed by adenoassociated virus. Mice (C57BL6/j bom tac) (n=5-6 per group) were i.v. injected with either soluble human SorCS1 (AAV-hsol.sorcs1) or LacZ (AAV-LacZ) adenoassociated virus (AAV). The titer of virus injected was 1 E11 vgc/mouse (vgc=viral genome copies). The mice were weighed every fortnight. Mice treated with AAV-hsol.sorcs1 gained 32% less weight on normal chow in 150 days, as compared to the LacZ control group. The effect of the virus on weight gain lasts up to 150 days post injection of virus (p=0.0296, 2-way ANOVA, treatment).

### AGENT OF THE INVENTION AND MEDICAL USES THEREOF

[0055] The present invention in various aspects concerns the Vps10p-domain receptors SorCS1 and SorCS3 such as polypeptides comprising the amino acids selected from the group SEQ ID NOs: 1, 2, 3, 4, 5, 6, 7, 8, 9, 10, 11, 12, 13, 14, 15, 16, 17, 18, 19, 20, 21, 22, 23, 24, 25, 26, 27, 28, 29, 30, 31, 32, 33, 34, 35, 36, 37, 38, 39, 40, 41, 42, 43, 44, 45, 46, 47, 48, 49, 50, 51, 52, 53, 54, 55, 56, 57, 58, 59, 60, 61, 62, 63 and 64

[0056] In one aspect the invention concerns a polypeptide having an amino acid sequence selected from the group consisting of SEQ ID NO: 61, 62, 63 and 64. In one embodiment the polypeptide has the amino acid sequence of SEQ ID NO: 61. In another embodiment the polypeptide has the amino acid sequence of SEQ ID NO: 62. In yet another embodiment the polypeptide has the amino acid sequence of SEQ ID NO: 63. In yet another embodiment the polypeptide has the amino acid sequence of SEQ ID NO: 64. In one embodiment the invention concerns any one of the polypeptides selected from the group consisting of SEQ ID NO: 61, 62, 63 and 64 for medical use.

[0057] The present inventors have found that overexpression of soluble SorCS1 in a subject results in decreased body weight of the subject. The inventors have also found that overexpression of soluble SorCS1 in mice decreases the desire of the mice to eat, i.e. reduces appetite.

[0058] The present inventors have studied the effect of administration of soluble SorCS1 in mice. The inventors have surprisingly found that following SorCS1 administration the mice loose weight as compared to control. Without being bound by theory, the weight loss has been correlated to a reduced desire to eat in the subjects having received SorCS1 treatment. Additionally the inventors have found that mice treated with SorCS1 exhibits a higher rate of metabolism, and has a higher degree of brown fat as compared to control mice receiving LacZ. Brown fat has a higher degree of mitochondria than white fat, and thus brown adipose tissue produces more heat than white adipose tissue. Consequently the present invention in one aspect also concern use of the SorCS1 agent of the present invention for increasing thermogenesis.

[0059] Specifically the inventors have demonstrated that a sixteen days treatment with hepatic adenoviral as well as adeno-associated viral overexpression of soluble SorCS1 (extracellular domain; prepro-soluble-SorCS1; SEQ ID NO: 15) results in a weight reduction of about 23% compared to mice treated with a control virus. The weight reduction is at least partly due to appetite suppression as food intake in the same period also was reduced compared to control mice. The weight reduction may also be related to an increased overall metabolism following SorCS1 treatment. Prepro-soluble-SorCS1 (SEQ ID NO: 5) is converted into active mature soluble SorCS1 (SEQ ID NO: 15) following administration by vivo posttranslational modification.

[0060] Consequently in a main aspect the present invention relates to an agent selected from the group consisting of:
[0061] a) an isolated polypeptide comprising:
   [0062] i) the amino acid sequence of SEQ ID NOs: 15; or
   [0063] ii) a biologically active sequence variant of the amino acid sequence of i) wherein the variant has at least 60% sequence identity to said SEQ ID NO: 15,
   [0064] iii) a biologically active fragment of at least 15 contiguous amino acids of any one of i) through ii), said fragment having at least 60% sequence identity to SEQ ID NO: 15 in a range of overlap of at least 15 amino acids,
[0065] b) a nucleic acid sequence encoding a polypeptide as defined in a);
[0066] c) a vector comprising the nucleic acid molecule as defined in b),
[0067] d) an isolated host cell transformed or transduced with the nucleic acid of b) or the vector of c), for use in a method for reducing appetite, and/or for promoting weight loss, and/or treating obesity, and/or increasing metabolism, and/or increasing thermogenesis, and/or converting white fat into brown fat.

[0068] In another aspect the present invention relates to an agent selected from the group consisting of:
[0069] a) an isolated polypeptide comprising:
   [0070] i) the amino acid sequence of SEQ ID NOs: 15; or
   [0071] ii) a biologically active sequence variant of the amino acid sequence of i) wherein the variant has at least 60% sequence identity to said SEQ ID NO: 15,
   [0072] iii) a biologically active fragment of at least 150 contiguous amino acids of any of i) and ii) wherein any amino acid specified in the chosen sequence is changed to a different amino acid, provided that no more than 30 of the amino acid residues in the sequence are so changed,
[0073] b) a nucleic acid sequence encoding a polypeptide as defined in a);
[0074] c) a vector comprising the nucleic acid molecule as defined in b),
[0075] d) an isolated host cell transformed or transduced with the nucleic acid of b) or the vector of c),
   for use in a method for reducing appetite, and/or for promoting weight loss, and/or treating obesity, and/or increasing metabolism, and/or increasing thermogenesis, and/or converting white fat into brown fat.

[0076] In one aspect the invention concern the use of an agent selected from the group consisting of:
[0077] a) an isolated polypeptide comprising:
   [0078] i) the amino acid sequence of SEQ ID NOs: 15; or
   [0079] ii) a biologically active sequence variant of the amino acid sequence of i) wherein the variant has at least 60% sequence identity to said SEQ ID NO: 15,
   [0080] iii) a biologically active fragment of at least 15 contiguous amino acids of any one of i) through ii), said fragment having at least 60% sequence identity to SEQ ID NO: 15 in a range of overlap of at least 15 amino acids,
[0081] b) a nucleic acid sequence encoding a polypeptide as defined in a);
[0082] c) a vector comprising the nucleic acid molecule as defined in b),
[0083] d) an isolated host cell transformed or transduced with the nucleic acid of b) or the vector of c),
[0084] for the preparation of a medicament for reduction of appetite, and/or for promoting weight loss, and/or increasing metabolism, and/or increasing thermogenesis, and/or converting white fat into brown fat and/or for treating obesity.

[0085] In one aspect the invention concerns a method for reducing appetite, and/or for promoting weight loss, and/or for treating obesity, and/or for increasing metabolism, and/or for increasing thermogenesis, and/or for converting white fat into brown fat, the method comprising administering to an individual in need thereof a therapeutically effective amount of an agent selected from the group consisting of:
[0086] a) an isolated polypeptide comprising:
   [0087] i) the amino acid sequence of SEQ ID NOs: 15; or
   [0088] ii) a biologically active sequence variant of the amino acid sequence of i) wherein the variant has at least 60% sequence identity to said SEQ ID NO: 15,
   [0089] iii) a biologically active fragment of at least 15 contiguous amino acids of any one of i) through ii), said fragment having at least 60% sequence identity to SEQ ID NO: 15 in a range of overlap of at least 15 amino acids,
[0090] b) a nucleic acid sequence encoding a polypeptide as defined in a);
[0091] c) a vector comprising the nucleic acid molecule as defined in b),
[0092] d) an isolated host cell transformed or transduced with the nucleic acid of b) or the vector of c).

[0093] In one aspect the invention concerns a method for treating obesity the method comprising administering to an individual in need thereof a therapeutically effective amount of an agent selected from the group consisting of:
[0094] a) an isolated polypeptide comprising:
   [0095] i) the amino acid sequence of SEQ ID NOs: 15; or
   [0096] ii) a biologically active sequence variant of the amino acid sequence of i) wherein the variant has at least 60% sequence identity to said SEQ ID NO: 15,
   [0097] iii) a biologically active fragment of at least 15 contiguous amino acids of any one of i) through ii), said fragment having at least 60% sequence identity to SEQ ID NO: 15 in a range of overlap of at least 15 amino acids,
[0098] b) a nucleic acid sequence encoding a polypeptide as defined in a);
[0099] c) a vector comprising the nucleic acid molecule as defined in b),
[0100] d) an isolated host cell transformed or transduced with the nucleic acid of b) or the vector of c).

[0101] In one aspect the invention concerns a method for increasing metabolism, the method comprising administering to an individual in need thereof a therapeutically effective amount of an agent selected from the group consisting of:
[0102] a) an isolated polypeptide comprising:
   [0103] i) the amino acid sequence of SEQ ID NOs: 15; or
   [0104] ii) a biologically active sequence variant of the amino acid sequence of i) wherein the variant has at least 60% sequence identity to said SEQ ID NO: 15,
   [0105] iii) a biologically active fragment of at least 15 contiguous amino acids of any one of i) through ii), said fragment having at least 60% sequence identity to SEQ ID NO: 15 in a range of overlap of at least 15 amino acids,
[0106] b) a nucleic acid sequence encoding a polypeptide as defined in a);
[0107] c) a vector comprising the nucleic acid molecule as defined in b),
[0108] d) an isolated host cell transformed or transduced with the nucleic acid of b) or the vector of c).

[0109] In one aspect the invention concerns a method for increasing thermogenesis in a mammal, the method comprising administering to the mammal a therapeutically effective amount of an agent selected from the group consisting of:
[0110] a) an isolated polypeptide comprising:
   [0111] i) the amino acid sequence of SEQ ID NOs: 15; or
   [0112] ii) a biologically active sequence variant of the amino acid sequence of i) wherein the variant has at least 60% sequence identity to said SEQ ID NO: 15,
   [0113] iii) a biologically active fragment of at least 15 contiguous amino acids of any one of i) through ii), said fragment having at least 60% sequence identity to SEQ ID NO: 15 in a range of overlap of at least 15 amino acids,
[0114] b) a nucleic acid sequence encoding a polypeptide as defined in a);
[0115] c) a vector comprising the nucleic acid molecule as defined in b),
[0116] d) an isolated host cell transformed or transduced with the nucleic acid of b) or the vector of c).

[0117] In one aspect the invention concerns an in vivo method for converting white fat into brown fat, the method comprising administering to a mammal a therapeutically effective amount of an agent selected from the group consisting of:
[0118] a) an isolated polypeptide comprising:
   [0119] i) the amino acid sequence of SEQ ID NOs: 15; or
   [0120] ii) a biologically active sequence variant of the amino acid sequence of i) wherein the variant has at least 60% sequence identity to said SEQ ID NO: 15,
   [0121] iii) a biologically active fragment of at least 15 contiguous amino acids of any one of i) through ii), said fragment having at least 60% sequence identity to SEQ ID NO: 15 in a range of overlap of at least 15 amino acids,
[0122] b) a nucleic acid sequence encoding a polypeptide as defined in a);
[0123] c) a vector comprising the nucleic acid molecule as defined in b),
[0124] d) an isolated host cell transformed or transduced with the nucleic acid of b) or the vector of c).

[0125] In another aspect the invention concerns an in vitro method for converting white fat into brown fat, the method comprising contacting a cell with an effective amount of an agent selected from the group consisting of:
[0126] a) an isolated polypeptide comprising:
   [0127] i) the amino acid sequence of SEQ ID NOs: 15; or
   [0128] ii) a biologically active sequence variant of the amino acid sequence of i) wherein the variant has at least 60% sequence identity to said SEQ ID NO: 15,
   [0129] iii) a biologically active fragment of at least 15 contiguous amino acids of any one of i) through ii), said fragment having at least 60% sequence identity to SEQ ID NO: 15 in a range of overlap of at least 15 amino acids,
[0130] b) a nucleic acid sequence encoding a polypeptide as defined in a);
[0131] c) a vector comprising the nucleic acid molecule as defined in b),
[0132] d) an isolated host cell transformed or transduced with the nucleic acid of b) or the vector of c).

[0133] In another aspect the present invention concerns an agent selected from the group consisting of:
[0134] a) an isolated polypeptide comprising:
   [0135] i) the amino acid sequence of SEQ ID NOs: 15; or
   [0136] ii) a biologically active sequence variant of the amino acid sequence of i) wherein the variant has at least 60% sequence identity to said SEQ ID NO: 15,
   [0137] iii) a biologically active fragment of at least 15 contiguous amino acids of any one of i) through ii), said fragment having at least 60% sequence identity to SEQ ID NO: 15 in a range of overlap of at least 15 amino acids,
[0138] b) a nucleic acid sequence encoding a polypeptide as defined in a);
[0139] c) a vector comprising the nucleic acid molecule as defined in b),
[0140] d) an isolated host cell transformed or transduced with the nucleic acid of b) or the vector of c),
   for use in a method for the cosmetic treatment of obesity.

[0141] In one embodiment the agent of the invention is for cosmetic use in general, e.g. by reduction of local fat by local application to a mammal such as a human being, of a formulation comprising the agent of the present invention.

[0142] In another aspect the invention concerns a method for supporting weight loss comprising administering a functional food or dietary supplement comprising the agent of the present invention.

[0143] In conjunction with the present studies the inventors found that even high overexpression of SorCS1 does not cause hypoglycemia in euglycemic mice. Accordingly SorCS1 can be used to treat overweight and/or obese patients which patients are not afflicted with insulin resistance or diabetes.

[0144] Thus in one embodiment the agent of the present invention is for use in non-diabetic patients, i.e. patients who are not suffering from any type of diabetes, e.g. patients who are not suffering from type II diabetes.

[0145] In another embodiment the agent of the present invention is for use in non-insulin resistant patients, i.e. patients which are not afflicted with insulin resistance.

[0146] In one embodiment the subject receiving therapy with the agent of the present invention does not suffer from insulin resistance and/or diabetes mellitus type 2.

[0147] In one embodiment the agent of the present invention is for use in a combination treatment of obesity and insulin resistance.

[0148] In another embodiment the agent of the present invention is for use in a combination treatment of obesity and type II diabetes.

[0149] In another embodiment the agent of the present invention is for use in a combination treatment of over-weight and insulin resistance.

[0150] In certain embodiments it may be relevant with a combination treatment either to obtain enhanced effect of the condition to be treated or to effectively target multiple conditions as defined above. Thus the agent according to the invention may be administered with at least one other compound.

[0151] In one embodiment the agent of the present invention is a polypeptide variant, wherein any amino acid specified in the selected sequence is altered to provide a conservative substitution.

[0152] In one embodiment of the present invention the agent as defined herein is a polypeptide having at least 65%, more preferably at least 70%, more preferably at least 75%, preferably at least 80%, more preferably at least 85%, more preferably at least 90%, more preferably at least 91%, more preferably at least 92%, more preferably at least 93%, more preferably at least 94%, more preferably at least 95%, more preferably at least 96%, more preferably at least 97%, more preferably at least 98%, more preferably at least 99% sequence identity to an amino acid sequence selected from the group consisting of SEQ ID NOs: 15, 5, 1, 2, 3, 4, 6, 7, 8, 9, 10, 11, 12, 13, 14, 16, 17, 18, 19, 20, 21, 22, 23, 24, 25, 26, 27, 28, 29, 30, 31, 32, 33, 34, 35, 36, 37, 38, 39, 40, 41, 42, 43, 44, 45, 46, 47, 48, 49, 50, 51, 52, 53, 54, 55, 56, 57, 58, 59, 60, 61, 62, 63 and 64.

[0153] The agent of the invention is preferably a human SorCS1 polypeptide either in mature form or having an intact signal peptide (pre-domain) and/or pro-domain peptide. In one embodiment the agent is a polypeptide selected from the group consisting of SEQ ID NOs: 1, 2, 3, 4, 6, 7, 8, 9, 11, 12, 13 and 14.

[0154] In another embodiment the agent is a non-human polypeptide selected from the group consisting of SEQ ID NOs: 16, 17, 18, 19, 20, 22, 26, 28, 29, 30, 31 and 32.

[0155] In one embodiment, the active polypeptide of the present invention as defined above is selected from the group consisting of SEQ ID NOs: 15, 5, 1, 2, 3, 4, 6, 7, 8, 9, 10, 11, 12, 13, 14, 16, 17, 18, 19, 20, 21, 22, 23, 24, 25, 26, 27, 28, 29, 30, 31, 32, 33, 34, 35, 36, 37, 38, 39, 40, 41, 42, 43, 44, 45, 46, 47, 48, 49, 50, 51, 52, 53, 54, 55, 56, 57, 58, 59, 60, 61, 62, 63 and 64.

[0156] Biologically active variants of the above listed amino acid sequences are also considered to fall within the scope of the present invention. Accordingly in one embodiment the polypeptide is a variant polypeptide, wherein any amino acid specified in the selected sequence is altered to provide a conservative substitution as defined above. Accordingly, the polypeptide preferably has at least 40%, such as at least 41%, such as at least 42%, such as at least 43%, such as at least 44%, such as at least 45%, such as at least 46%, such as at least 47%, such as at least 48%, such as at least 49%, e.g. 50%, such as at least 51%, such as at least 52%, such as at least 53%, such as at least 54%, such as 55%, such as at least 56%, such as at least 57%, such as at least 58%, such as at least 59%, e.g. 60%, such as 61%, e.g. 62%, such as 63%, e.g. 64%, such as 65%, such as at least 66%, such as at least 67%, such as at least 68%, such as at least 69%, e.g. 70%, such as at least 71%, such as at least 72%, such as at least 73%, such as at least 74%, e.g. 75%, such as at least 76%, such as at least 77%, such as at least 78%, such as at least 79%, such as 80%, such as at least 81%, such as at least 82%, such as at least 83%, such as at least 84%, e.g. 85%, such as at least 86%, such as at least 87%, such as at least 88%, such as at least 89%, such as 90%, such as at least 91%, such as at least 92%, such as at least 93%, such as at least 94%, e.g. 95%, such as such as at least 96%, such as at least 97%, such as at least 98%, e.g. at least 99% such as 100% sequence identity to a protein having a sequence selected from the group consisting of SEQ ID NOs: 15, 5, 1, 2, 3, 4, 6, 7, 8, 9, 10, 11, 12, 13, 14, 16, 17, 18, 19, 20, 21, 22, 23, 24, 25, 26, 27, 28, 29, 30, 31, 32, 33, 34, 35, 36, 37, 38, 39, 40, 41, 42, 43, 44, 45, 46, 47, 48, 49, 50, 51, 52, 53, 54, 55, 56, 57, 58, 59, 60, 61, 62, 63 and 64.

[0157] In one embodiment, the polypeptide is a naturally occurring allelic variant of the sequence selected from the group consisting of SEQ ID NOs: 15, 5, 1, 2, 3, 4, 6, 7, 8, 9, 10, 11, 12, 13, 14, 16, 17, 18, 19, 20, 21, 22, 23, 24, 25, 26, 27, 28, 29, 30, 31, 32, 33, 34, 35, 36, 37, 38, 39, 40, 41, 42, 43, 44, 45, 46, 47, 48, 49, 50, 51, 52, 53, 54, 55, 56, 57, 58, 59, 60, 61, 62, 63 and 64 and preferably the polypeptide comprises an amino acid sequence selected from the group consisting of: SEQ ID NOs: 15, 5, 10, 21, 27, 33, 37, 39, 43 and 47.

[0158] More preferably the agent of the invention is a polypeptide variant having at least 40%, such as at least 45%, e.g. 50%, such as 55%, e.g. 60%, such as 65%, e.g. 70%, e.g. 75%, such as 80%, e.g. 85%, such as 90%, e.g. 95%, such as 98%, e.g. 99% sequence identity to a protein having a sequence selected from the group consisting of SEQ ID NOs: 15, 5, 64, 62, 10, 21, 27, 33, 37, 39, 43 and 47

[0159] Polypeptides expressed in eukaryotic cells are often glycosylated, such as N- or O-glycosylated. The glycosylation pattern is important for interaction of the folded polypeptide with other molecules and affects the polarity of the polypeptide.

[0160] Thus in one embodiment the polypeptide agent of the invention is glycosylated, such wherein the agent is a polypeptide selected from the group consisting of SEQ ID NOs: 1, 2, 3, 4, 6, 7, 8, 9, 11, 12, 13, 14, wherein the polypeptide may be glycosylated in one or more of the following amino acid residue positions 184, 352, 433, 765, 776, 816, 847, 908 and 929, and/or wherein the polypeptide is selected from the group consisting of SEQ ID NOs: 16, 17, 18, 19, 20, 22, 26, 28, 29, 30, 31 and 32, wherein the polypeptide may be glycosylated in one or more of the following amino acid residue positions 184, 352, 433, 765, 776, 816, 847, 908 and 929, and in another embodiment the glycosylated fragment has the sequence selected from the group consisting of SEQ ID NO: 5, 10 and 15, or the glycosylated polypeptide fragment has the sequence selected from the group consisting of SEQ ID NO: 21, 27 and 33.

[0161] In one embodiment the polypeptide is N-glycosylated in one or more asparagin amino acid residues corresponding to amino acid positions 184, 352, 433, 765, 776, 816, 847, 908 and 929 of SEQ ID NO: 1 or equivalent positions in post-translationally modified variants of SEQ ID NO: 1.

[0162] In some embodiments, however, it is preferred that the polypeptide expressed is subsequently deglycosylated. This may be achieved by methods known by the person of skill in the art.

[0163] While native SorCS1 and the other native Vps10p-domain receptors are Type-I membrane proteins it is preferred that the agent of the invention has been genetically modified, such as C-terminally truncated to remove the single transmembrane helix and the intracellular C-terminal. Thus in one embodiment the agent of the invention comprises a soluble fragment of a polypeptide as defined herein or a fragment of a variant, and accordingly. In one such embodiment the polypeptide is a soluble polypeptide being a fragment of the sequences selected from the group consisting of SEQ ID NOs: 1, 2, 3, 4, 6, 7, 8, 9, 11, 12, 13, 14, or the polypeptide is a soluble polypeptide being a fragment of the sequences of SEQ ID NO: 15.

[0164] In certain embodiments it may be advantageous to enhance the intramolecular stability by forming cystein bridges. In one embodiment the polypeptide as defined herein is capable of forming at least one intramolecular cystin bridge. Occasionally it is advantageous for stability and efficacy to administer a multimer such as a dimer of the polypeptides of the invention. In one embodiment the polypeptide as defined herein above comprises a dimer of said polypeptide linked through at least one intermolecular cystin bridge.

[0165] The polypeptide of the invention may comprise a tag useful for purification. In one embodiment the polypeptide according to the present invention comprises an affinity tag, such as a polyhis tag, a GST tag, a HA tag, a Flag tag, a C-myc tag, a HSV tag, a V5 tag, a maltose binding protein tag, a cellulose binding domain tag. In addition to affinity tags, the polypeptide of the invention may also comprise tags altering the functionallity of the polypeptide such as tags or conjugated groups altering the plasma and/or serum half-life of SorCS1 administered to a mammal as discussed herein below in the section concerning agents of the invention having increased half-life.

Medical Use of Other Vps10p-Domain Receptors

[0166] As indicated above, the invention is not limited to mature soluble SorCS1, but can be any biologically active sequence variant thereof as well as nucleotides encoding SorCS1 or a fragment or variant thereof, including vectors comprising the nucleotide encoding the SorCS1 polypeptide. Thus in one embodiment the invention relates to a nucleic acid sequence encoding a polypeptide as defined above for use in the supression of appetite, reduction of hunger and/or reduction of prospective consumption and/or reduction of the desire to eat, and/or increasing satiety, and/or treatment of obesity, and/or for promoting weight loss, and/or increasing metabolism, and/or increasing thermogenesis, and/or converting white fat into brown fat. The invention also concerns cells comprising the nucleic acid sequence or the above expression vector.

[0167] Variants of SorCS1 as defined in the present invention may in certain embodiments include full length or fragments of other Vps10p-domain receptors.

TABLE 3
Sequence identity between human full length SorCS1
and other full length Vps10p-D receptors

| Name | % identity | SEQ ID NO: |
|---|---|---|
| SorCS1 | 100 | 5 |
| SorCS2 | 43 | 54 |
| SorCS3 | 64 | 55 |
| Sortilin | 18 | 52 |
| SorLA | 13 | 53 |

[0168] In one embodiment the agent of the present invention is SorCS3. Accordingly, in one aspect the present invention relates to an agent selected from the group consisting of:
[0169] a) an isolated polypeptide comprising:
   [0170] i) the amino acid sequence of SEQ ID NOs: 55, 56, 57, 58, 59 and 60; or
   [0171] ii) a biologically active sequence variant of the amino acid sequence of i) wherein the variant has at least 60% sequence identity to said SEQ ID NO: 55, 56, 57, 58, 59 and 60,
   [0172] iii) a biologically active fragment of at least 15 contiguous amino acids of any one of i) through ii), said fragment having at least 60% sequence identity to SEQ ID NO: 55, 56, 57, 58, 59 and 60 in a range of overlap of at least 15 amino acids,
[0173] b) a nucleic acid sequence encoding a polypeptide as defined in a);
[0174] c) a vector comprising the nucleic acid molecule as defined in b),
[0175] d) an isolated host cell transformed or transduced with the nucleic acid of b) or the vector of c),
   for use in a method for reducing appetite, and/or for promoting weight loss, and/or treating obesity, and/or increasing metabolism, and/or increasing thermogenesis, and/or converting white fat into brown fat.

[0176] In one embodiment the agent is a biologically active fragment of any one of SEQ ID NO: 55, 56, 57, 58, 59 and 60, wherein the fragment comprises less than 500 contiguous amino acid residues, such as less than 450 contiguous amino acid residues, for example less than 400 contiguous amino acid residues, such as less than 350 contiguous amino acid residues, for example less than 300 contiguous amino acid residues, for example less than 250 contiguous amino acid residues, such as less than 240 contiguous amino acid residues, for example less than 225 contiguous amino acid residues, such as less than 200 contiguous amino acid residues, for example less than 180 contiguous amino acid residues, such as less than 160 contiguous amino acid residues, for example less than 150 contiguous amino acid residues, such as less than 140 contiguous amino acid residues, for example less than 130 contiguous amino acid residues, such as less than 120 contiguous amino acid residues, for example less than 110 contiguous amino acid residues, such as less than 100 contiguous amino acid residues, for example less than 90 contiguous amino acid residues, such as less than 85 contiguous amino acid residues, for example less than 80 contiguous amino acid residues, such as less than 75 contiguous amino acid residues, for example less than 70 contiguous amino acid residues, such as less than 65 contiguous amino acid residues, for example less than 60 contiguous amino acid residues, such as less than 55 contiguous amino acid residues, for example less than 50 contiguous amino acid residues, such as less than 45 contiguous amino acid residues, for example less than 40 contiguous amino acid residues, such as 35 contiguous amino acid residues, for example 30 contiguous amino acid residues, such as 25 contiguous amino acid residues, such as 20 contiguous amino acid residues, for example 15 contiguous amino acid residues of an any one of the amino acid sequences selected from the group consisting of SEQ ID NOs: SEQ ID NO: 55, 56, 57, 58, 59 and 60.

[0177] In another embodiment the agent is a biologically active fragment of any one of SEQ ID NO: 55, 56, 57, 58, 59 and 60, wherein the fragment comprises at least 15 contiguous amino acid residues, such as more than 20 contiguous amino acid residues, for example more than 25 contiguous amino acid residues, for example more than 50 contiguous amino acid residues, such as more than 75 contiguous amino acid residues, for example more than 100 contiguous amino acid residues, such as more than 125 contiguous amino acid residues, for example more than 150 contiguous amino acid residues, such as more than 175 contiguous amino acid residues, for example more than 200 contiguous amino acid residues, such as more than 225 contiguous amino acid residues, for example more than 250 contiguous amino acid residues, such as more than 275 contiguous amino acid residues, for example more than 300 contiguous amino acid residues, such as more than 325 contiguous amino acid residues, for example more than 350 contiguous amino acid residues, such as more than 375 contiguous amino acid residues, for example more than 400 contiguous amino acid residues, such as more than 425 contiguous amino acid residues, for example more than 450 contiguous amino acid residues, such as more than 475 contiguous amino acid residues, for example more than 500 contiguous amino acid residues, such as more than 525 contiguous amino acid residues, for example more than 550 contiguous amino acid residues, such as more than 575 contiguous amino acid residues, for example more than 600 contiguous amino acid residues, such as more than 625 contiguous amino acid residues, for example more than 650 contiguous amino acid residues, such as more than 675 contiguous amino acid residues, such as more than 700 contiguous amino acid residues of any one of the amino acid sequences selected from the group consisting of SEQ ID NOs: SEQ ID NO: 55, 56, 57, 58, 59 and 60.

[0178] In one embodiment the agent of the present invention is SorCS2. Accordingly, in one aspect the present invention relates to an agent selected from the group consisting of:
[0179] a) an isolated polypeptide comprising:
   [0180] i) the amino acid sequence of SEQ ID NOs: 54; or
   [0181] ii) a biologically active sequence variant of the amino acid sequence of i) wherein the variant has at least 60% sequence identity to said SEQ ID NO: 54,
   [0182] iii) a biologically active fragment of at least 15 contiguous amino acids of any one of i) through ii), said fragment having at least 60% sequence identity to SEQ ID NO: 54 in a range of overlap of at least 15 amino acids,
[0183] b) a nucleic acid sequence encoding a polypeptide as defined in a);
[0184] c) a vector comprising the nucleic acid molecule as defined in b),
[0185] d) an isolated host cell transformed or transduced with the nucleic acid of b) or the vector of c),
   for use in a method for reducing appetite, and/or for promoting weight loss, and/or treating obesity, and/or increasing metabolism, and/or increasing thermogenesis, and/or converting white fat into brown fat.

[0186] In one embodiment the agent of the present invention is Sortilin. Accordingly, in one aspect the present invention relates to an agent selected from the group consisting of:
[0187] a) an isolated polypeptide comprising:
   [0188] i) the amino acid sequence of SEQ ID NOs: 52; or
   [0189] ii) a biologically active sequence variant of the amino acid sequence of i) wherein the variant has at least 60% sequence identity to said SEQ ID NO: 52,
   [0190] iii) a biologically active fragment of at least 15 contiguous amino acids of any one of i) through ii), said fragment having at least 60% sequence identity to SEQ ID NO: 52 in a range of overlap of at least 15 amino acids,
[0191] b) a nucleic acid sequence encoding a polypeptide as defined in a);
[0192] c) a vector comprising the nucleic acid molecule as defined in b),
[0193] d) an isolated host cell transformed or transduced with the nucleic acid of b) or the vector of c),
   for use in a method for reducing appetite, and/or for promoting weight loss, and/or treating obesity, and/or increasing metabolism, and/or increasing thermogenesis, and/or converting white fat into brown fat.

### Obesity Associated Disorders

[0194] In certain aspects the present invention concern obesity associated disorders such as obesity associated sleep disorders, e.g. obesity related breathing disorders.

[0195] Accordingly, in one embodiment the invention concerns an agent selected from the group consisting of:
[0196] a) an isolated polypeptide comprising:
   [0197] i) the amino acid sequence of SEQ ID NOs: 15; or
   [0198] ii) a biologically active sequence variant of the amino acid sequence of i) wherein the variant has at least 60% sequence identity to said SEQ ID NO: 15,
   [0199] iii) a biologically active fragment of at least 15 contiguous amino acids of any one of i) through ii), said fragment having at least 60% sequence identity to SEQ ID NO: 15 in a range of overlap of at least 15 amino acids,
[0200] b) a nucleic acid sequence encoding a polypeptide as defined in a);
[0201] c) a vector comprising the nucleic acid molecule as defined in b),
[0202] d) an isolated host cell transformed or transduced with the nucleic acid of b) or the vector of c),
   for use in a method for treating or preventing or reducing incidence of a sleep-related breathing disorder in an individual in need thereof.

[0203] In one embodiment the obesity-associated and/or sleep-related breathing disorder is selected from central sleep apnea (CSA), Cheyne-Stokes breathing-central sleep apnea (CSB-CSA), obesity hypoventilation syndrome (OHS), congenital central hypoventilation syndrome (CCHS), obstructive sleep apnea (OSA) and idiopathic central sleep apnea (ICSA).

[0204] In one aspect the present invention concerns an agent selected from the group consisting of:
[0205] a) an isolated polypeptide comprising:
   [0206] i) the amino acid sequence of SEQ ID NOs: 15; or
   [0207] ii) a biologically active sequence variant of the amino acid sequence of i) wherein the variant has at least 60% sequence identity to said SEQ ID NO: 15,
   [0208] iii) a biologically active fragment of at least 15 contiguous amino acids of any one of i) through ii), said fragment having at least 60% sequence identity to SEQ ID NO: 15 in a range of overlap of at least 15 amino acids,
[0209] b) a nucleic acid sequence encoding a polypeptide as defined in a);
[0210] c) a vector comprising the nucleic acid molecule as defined in b),
[0211] d) an isolated host cell transformed or transduced with the nucleic acid of b) or the vector of c),
   for use in a method for treating or preventing or reducing incidence of an obesity associated disorder selected from the group consisting of non-alcoholic fatty liver disease, sleep apnea, obesity associated metabolic disorders e.g. osteoarthritis, unwanted weight gain or body mass index and excessive appetite resulting in unwanted weight gain.

### Agents of the Invention Having Increased Half-Life

[0212] One approach to improve the efficacy of a therapeutic protein such as SorCS1 or SorCS3 of the present invention is to increase its serum persistence, thereby allowing higher circulating levels, and/or allowing circulating levels to be present for a longer time thereby providing higher exposure (AUC), less frequent administration and reduced doses.

[0213] In determining bioequivalence, for example, between two products such as a commercially-available product and a candidate drug, pharmacokinetic studies are conducted whereby each of the preparations are administered in a cross-over study to volunteer subjects, generally healthy individuals but occasionally in patients. Serum/plasma samples are obtained at regular intervals and assayed for parent drug (or occasionally metabolite) concentration. Occasionally, blood concentration levels are neither feasible nor possible to compare the two products, then pharmacodynamic endpoints rather than pharmacokinetic endpoints are used for comparison. For a pharmacokinetic comparison, the plasma concentration data are used to assess key pharmacokinetic parameters such as area under the curve (AUC), peak concentration (Cₘₐₓ), time to peak concentration (Tₘₐₓ), and absorption lag time (t_{lag}). Testing can be conducted at several different doses, especially when the drug displays non-linear pharmacokinetics.

[0214] In addition to data from bioequivalence studies, other data may need to be submitted to meet regulatory requirements for bioequivalence. Such evidence may include analytical method validation and/or in vitro-in vivo correlation studies (IVIVC).

[0215] In one particular embodiment, the agent of the invention, such as the polypeptide of the invention is modified in order to provide higher exposure (AUC), less frequent administration and reduced doses.

[0216] In another embodiment, the agent of the invention, such as the polypeptide of the invention is modified in order to increase its half-life when administered to a patient, in particular its plasma half-life. In particular, the agent, such as the polypeptide is modified in order to increase its plasma halflife. A number of methods are available in the art for modification of peptide drugs in order to increase its halflife, and such methods of the art can be employed for modification of the SorCS1 polypeptides of the present invention and variants thereof. Short plasma half-life times are often caused by fast renal clearance as well as enzymatic degradation occurring during systemic circulation. Modifications of the peptide/protein can lead to prolonged plasma half-life times. Increased halflife can for example be obtained by shortening the overall amino acid amount of the polypeptide.

[0217] Exopeptidases is a prominent group of proteolytic enzymes occurring in plasma, liver and kidney, which affect therapeutic peptides and proteins. Thus, modification of either or both of the peptide drug termini in many cases increase enzymatic stability, and thus plasma halflife. Thus, in one approach, one or more additional compounds are coupled to a polypeptide of the present invention, in order to increase its plasma halflife. In one embodiment, the terminal modification is N-acetylation and/or C-amidation. In another such embodiment, The N and/or C-terminus is conjugated to polyethylenglycol (PEG) compounds. One specific modification of the polypeptide is the dual modification of N-terminal palmitoyl and C-terminal PEGylation. A headto-tail cyclization of the polypeptide drug by the formation of an amide bond between C- and N-terminus is also possible in order to prevent exopeptidase caused degradation of the SorCS1 polypeptide.

[0218] In another embodiment, increased plasma halflife is obtained by replacement of one or more amino acids, which are known to be susceptible to enzymatic cleavage, thereby letting the polypeptide escape proteolytic degradation. For example, one or more L-amino acids could be substituted with D-amino acids at one or both polypeptide termini, and/or within the polypeptide in order to avoid degradation, and thereby increase plasms halflife.

[0219] Increased halflife of the polypeptide of the invention can also be obtained by coadministration of the polypeptide with one or more specific enzyme inhibitors. Such enzyme inhibitors could be included in the kit-of-parts of the invention. In yet another approach, increased halflife could be obtained by increasing the molecular mass of the SorCS1 polypeptide of the invention.

[0220] As a general rule, substances with a molecular mass below 5 kDa which are not bound to plasma proteins are excreted via the renal route, whereas molecules with a molecular mass over 50 kDa cannot or only in very small amounts be found in the glomerular ultrafiltrate. Accordingly, a main reason for short peptide and protein half-life time beside enzymatic degradation is their fast renal excretion. Therefore, half-life time can be prolonged by increasing the polypeptide drug size. Furthermore, a synergistic effect may be given by additional enzyme inhibition. Beside chemical modification of N- and C-termini which is an effective way to inhibit exopeptidases and replacement of labile amino acids, PEGylation allows to specifically protect endangered termini and furthermore increases molecular mass. In addition, PEGylation within the drug molecule expectedly leads to improved enzymatic stability mediated by a steric hindrance of proteolytic enzymes.

[0221] Poly(ethyleneglycol) (PEG) exhibits several beneficial properties: high water solubility, high mobility in solution, lack of toxicity and immunogenicity and ready clearance from the body. Very often these properties are transferred to PEG-protein or PEG-peptide conjugates. The extent of these feature are dependent on the molecular weight of the attached PEG.

[0222] Also polymers of N-acetylneuraminic acid (polysialic acids) may be used as conjugates to a polypeptide of the invention. Polysialic acids are naturally occurring, biodegradable, highly hydrophilic compounds which have no known receptors in the human body. PEGylation and sialyation prolong half-life time by a combination of two mechanisms—improvement of enzymatic stability and decrease of renal excretion by increasing molecular mass.

[0223] Albumin is known to have a long plasma half-life and because of this property it has been used in drug delivery in order to increase halflife of drugs. For this purpose albumin has been conjugated to such pharmaceutical compounds. Especially suitable is coupling to the free cysteine residue on the albumin molecule (Cys 34), e.g. by methods described in WO2010092135, especially the methods using PDPH (3-(2-pyridyldithio) propionyl hydrazide) to link albumin to a SorCS polypeptide of the invention including fragments thereof via a hydrazone link to the SorCS1 polypeptide. Another coupling technology is described by Neose (see eg US2004/0126838) using enzymatic glycoconjugation. This technology can be used to link e.g. albumin to a SorCS1 polypetide of the invention using a suitable linker.

[0224] In certain embodiments the present invention concerns a long-acting modified SorCS1 polypeptide wherein said modified polypeptide comprises a mammalian SorCS1 or analog thereof linked to a pharmaceutically acceptable molecule, e.g. human SorCS1 linked to, e.g. fused to, albumin, or fused to a fatty acid of suitable length, or fused to an Fc fragment of a mammalian antibody, or a variant of an Fc fragment of a mammalian antibody or conjugated to an acylation group or PEG, that in some embodiments provides an in vivo plasma half-life of the mammalian SorCS1 or analog thereof, or the modified SorCS1 which is from 2 to 48 hours or longer, typically from 4 to 28 hours, such as 6-8 hours in a mammal.

[0225] The creation of fusion proteins comprised of immunoglobulin constant regions linked to a protein of interest, or fragment thereof, has been described (see, e.g., U.S. Pat. Nos. 5,155,027, 5,428,130, 5,480,981, and 5,808,029). These molecules usually possess both the biological activity associated with the linked molecule of interest as well as the effector function, or some other desired characteristic, associated with the immunoglobulin constant region. Fusion proteins comprising an Fc portion of an immunoglobulin can bestow several desirable properties on a fusion protein including increased stability, increased serum half-life (see Capon et al. (1989) Nature 337:525) as well as binding to Fc receptors such as the neonatal Fc receptor (FcRn) (U.S. Pat. Nos. 6,086,875, 6,030,613, and 6,485,726).

[0226] In one embodiment the moiety resulting in increased half-life is a multifunctional moiety, such as bi- or trifunctional, which may be covalently linked to one or more SorCS1 molecules, such as one or more mammalian SorCS1 molecule, and covalently linked to one or more pharmaceutically acceptable molecule(s) so as to create the modified SorCS1 compound. The linker may be stabile which means that no significant chemical reactions, e.g. hydrolysis, occurs at physiological conditions (e.g. temperature of 37° C. and pH 7.4) over the time period of the treatment. This can be determined by stability studies known in the art. The linker may be a chemical linker meaning that it is generated by organic chemistry outside a living cell. The linker may be a sugar moiety, such as a glycosylation on a protein, or may be chemically prepared and used to link the SorCS1 molecule, and a second pharmaceutically acceptable molecule such as PEG variants, albumin, fatty acids or antibodies or antibody fragments such as Fc fragments.

[0227] In one embodiment, the agent, such as SorCS1 polypetide, of the invention is coupled to a immunoglobulin-Fc such as IgG-Fe.

[0228] The SorCS1 compound of the present invention may optionally comprise at least one peptide linker. In one embodiment, the linker is comprised of amino acids linked together by peptide bonds, wherein the amino acids are selected from the twenty naturally occurring amino acids. In various embodiments the linker can comprise 1-5 amino acids, 1-10 amino acids, 1-20 amino acids, 10-50 amino acids, 50-100 amino acids, or 100-200 amino acids. In one embodiment the amino acids are selected from glycine, alanine, proline, asparagine, glutamine, and lysine. In one embodiment a linker is made up of a majority of amino acids that are sterically unhindered, such as glycine and alanine. The linker in one embodiment can comprise the sequence Gn (equivalently, -(Gly)n-). The linker can in one embodiment comprise the sequence (GGS)n or (GGGGS)n. In each instance, n is an integer, such as 1, 2, 3, 4, 5, 6, 7, 8, 9, or 10. Examples of linkers include, but are not limited to, GGG, SGGSGGS (SEQ ID NO:65), GGSGGSGGSGGSGGG (SEQ ID NO:66),GGSGGSGGSGGSGGSGGS (SEQ ID NO:67), GGGGSGGGGSGGGGS (SEQ ID NO:68) and EFAGAAAV (SEQ ID NO:69).

[0229] In one embodiment the peptide linker has at least 1 amino acid, such as from 1-200 amino acids, typically 1-50 amino acids wherein the amino acids are selected from the twenty naturally occurring amino acids. Typically, the peptide linker has from 1-40 amino acids, such as from 1-30, such as from 1-20, such as from 1-10 amino acids. In a further embodiment the peptide linker is selected from a linker made up of amino acids selected from glycine, alanine, proline, asparagine, glutamine, and lysine. Typically, the peptide linker is made up of a majority of amino acids that are sterically unhindered, such as glycine and alanine. In particular, the peptide linker comprises a sequence selected from -(G)n-, (GGS)n or (GGGGS)n, wherein n is an integer of from 1-50. Typically n is an integer selected from 1-10, such as 1, 2, 3, 4, 5, 6, 7, 8, 9, or 10.

[0230] The antibody, antibody fragment, albumin, fatty acid or any other one of the half-life extending can be conjugated to SorCS1 via any suitable linker or linker region. The linker may be a disulphide bridge, such as a —S—S— bond between two cysteine (Cys) amino acid residues in each of the SorCS1, and the pharmaceutically acceptable molecule. The linker may be a fused linker meaning that SorCS1 can be expressed in a living cell as one polypeptide or protein. The linker may be a hydrophilic linker that separates an SorCS1 and a pharmaceutically acceptable molecule with a chemical moiety, which comprises at least 5 non-hydrogen atoms where 30-50% of these are either N or O. The linker may be hydrolysable as described in U.S. Pat. No. 6,515,100, U.S. Pat. No. 7,122,189, U.S. Pat. No. 7,700,551, WO2004/089280, WO2006/138572 and WO2009/095479. Typical compounds useful as linkers in the present invention include those selected from the group having dicarboxylic acids, malemido hydrazides, PDPH, SPDP, LC-SPDP, GMBS, carboxylic acid hydrazides, and small peptides. More specific examples of compounds useful as linkers, according to the present invention, include: (a) dicarboxylic acids such as succinic acid, glutaric acid, and adipic acid; (b) maleimido hydrazides such as N-[maleimidocaproic acid]hydrazide (EMCH), N-[maleimidopropionic acid]hydrazide (MPH or BMPH), 4-[N-maleimidomethyl]cyclohexan-1-carboxylhydrazide, and N-[k-maleimidoundcanoic acid]hydrazide (KMUH), 4-(4-N-MaleimidoPhenyl)butyric acid Hydrazide (MPBH); (c) NHS-3-maleimidopropionate Succinimide ester (MPS-EDA); (d) PDPH linkers such as (3-[2-pyridyldithio]propionyl hydrazide) conjugated to sulfurhydryl reactive protein; (e)N-Succinimidyl 3-(2-pyridyldithio)-propionate (SPDP), (f) Succinimidyl 6-(3-[2-pyridyldithio]-propionamido)hexanoate (LC-SPDP), (g)N-(v-Maleimidobutyryloxy)succinimide ester (GMBS), and (h) carboxylic acid hydrazides selected from 2-5 carbon atoms. Other non-peptide linkers are also possible. For example, alkyl linkers such as —NH—(CH2)m-C(0)-, wherein m is an integer selected from 2-20, could be used. These alkyl linkers may further be substituted by any non-sterically hindering group such as lower alkyl (e.g., C1 to C6) lower acyl, halogen (e.g., CI, Br, I, F), CN, NH2, phenyl, etc. An exemplary non-peptide linker is a PEG linker. Additional linkers useful according to the present invention are described in U.S. Pat. No. 6,660,843.

[0231] Different techniques for linking two or more molecules together, such as SorCS1 and the pharmaceutically acceptable molecule, and optionally via a multifunctional linker, such as bifunctional linker, are available in the prior art, and a suitable reference here is WO01/58493, including all relevant documents listed and cited therein.

[0232] In the present context, the term “a pharmaceutically acceptable molecule” as used herein means a molecule selected from any one of small organic molecules, peptides, oligopeptides, polypeptides, proteins, receptors, glycosylations, sugars, polymers (e.g. polyethylene glycols, PEG), nucleic acids (e.g. DNA and RNA), hormones, which when linked to SorCS1, increases the serum half-life of the SorCS1 or variant thereof. Typically, pharmaceutically acceptable molecules are without limitation albumin, such as human albumin, recombinant albumin, or polymer, such as PEG, e.g. PEG of a molecular weight of at least 10 kDa, such as from 10 kDa to 150 kDa. Furthermore, pharmaceutically acceptable molecules may be selected from a Fc fragment of a mammalian antibody, transferrin, albumin, such as human albumin, recombinant albumin, variants of albumin, CH₃(CH₂)ₙCO—, wherein n is 8 to 22, or polymer, such as PEG, e.g. PEG of a molecular weight of at least 5 kDa, such as from 10 kDa to 150 kDa, typically 10 to 40 kDa.

[0233] In the present context, the term “in vivo plasma half-life” is used in its normal meaning, i.e., the time required for the amount of SorCS1, in a biological system to be reduced to one half of its value by biological processes.

[0234] The term “serum half-life”, which may be used interchangeably with “plasma half-life” or “half-life” is used in its normal meaning, i.e., the time required for the amount of SorCS1 in a biological system to be reduced to one half of its concentration. Thus as used herein, the “serum half-life” means the serum half-life in vivo. Determination of serum half-life is often more simple than determining functional half-life and the magnitude of serum half-life is usually a good indication of the magnitude of functional in vivo half-life. Preferably the serum half-life is measured in a mammal, more preferably in a species of Hominidae, such as Orangutan, Chimpanzee or Gorillas, more preferably in humans. The serum half-lives mentioned in the present application are half-lives as determined in humans. An indication of the half-life or any change in half-life can also be obtained in rodents, such as mouse or rat or hamster. Furthermore half-life can be measured in larger mammals having a body weight in the same range as human beings or closer to human being body weight than rodents: preferably monkey, dog, pig, or cattle (calf).

[0235] The term “increased” as used in connection with the plasma half-life is used to indicate that the relevant half-life of the SorCS1 compound, as determined under comparable conditions. For instance the relevant half-life may be increased by at least about 25%, such as by at least about 50%, e.g., by at least about 100%, 150%, 200%, 250%, or 500%. Measurement of in vivo plasma half-life can be carried out in a number of ways as described in the literature. An increase in in-vivo plasma half-life may be quantified as a decrease in clearance or as an increase in mean residence time (MRT). The SorCS1 compound of the present invention for which the clearance is decreased to less than 70%, such as less than 50%, such as less than 20%, such as less than 10% of the clearance of the SorCS1, as determined in a suitable assay is said to have an increased in-vivo plasma half-life. SorCS1 of the present invention for which MRT is increased to more than 130%, such as more than 150%, such as more than 200%, such as more than 500% of the MRT of SorCS1, in a suitable assay is said to have an increased in vivo plasma half-life. Clearance and mean residence time can be assessed in standard pharmacokinetic studies using suitable test animals. It is within the capabilities of a person skilled in the art to choose a suitable test animal for a given protein. Tests in human, of course, represent the ultimate test. Suitable test animals include normal, Sprague-Dawley male rats, mice and cynomolgus monkeys. Typically the mice and rats are injected in a single subcutaneous bolus, while monkeys may be injected in a single subcutaneous bolus or in a single iv dose. The amount injected depends on the test animal. Subsequently, blood samples are taken over a period of one to ten days as appropriate (depending on the sensitivity of the assay it may be as long as 30 days) for the assessment of clearance and MRT. The blood samples are conveniently analysed by ELISA techniques or other immunological techniques.

[0236] In the present context, the term “plasma concentration” as used herein means the concentration that can be measured in circulation at any given time after injection of SorCS1. In the present context, the term “an injection” as used herein means administration by the parenteral route such as by subcutaneous, intramuscular, intraperitoneal or intravenous injection by means of a syringe or other administration device.

[0237] The most abundant protein component in circulating blood of mammalian species is serum albumin, which is normally present at a concentration of approximately 3 to 4.5 grams per 100 millilitres of whole blood. Serum albumin is a blood protein of approximately 70,000 Dalton (Da) which has several important functions in the circulatory system. It functions as a transporter of a variety of organic molecules found in the blood, as the main transporter of various metabolites such as fatty acids and bilirubin through the blood, and, owing to its abundance, as an osmotic regulator of the circulating blood. In the present context, the term “an albumin” as used herein means albumin of mammalian origin or non-mammalian origin, such as human serum albumin that is described in Peters, T., Jr. (1996) All about Albumin: Biochemistry, Genetics and Medical, Applications pp10, Academic Press, Inc., Orlando (ISBN O-12-5521 10-3), or recombinant human albumin, or modified albumin, such as human albumin modified as described in WO2011051489 and WO2010092135. WO2011051489 the specification relates to variants of a parent albumin having altered plasma half-life compared with the parent albumin. The present invention also relates to fusion polypeptides and conjugates comprising said variant albumin.

[0238] WO2010092135 based on the three-dimensional structure of albumin, the inventors have designed variant polypeptides (muteins) which have one or more cysteine residues with a free thiol group (hereinafter referred to as “thio-albumin”). The variant polypeptide may be conjugated through the sulphur atom of the cysteine residue to a conjugation partner such as a bioactive compound.

[0239] WO2005054286 the specification relates to proteins comprising Interleukin 11 (IL-11) (including, but not limited to, fragments and variants thereof), which exhibit thrombopoietic or antiinflammatory properties, fused to albumin (including, but not limited to fragments or variants of albumin).

[0240] WO2004083245 describes an agent having a greater half-life than naturally produced albumin in a patient with MS, the agent comprising an albumin-like first polypeptide bound to a second polypeptide.

[0241] WO03066681 describes a composition comprising a non-albumin protein stabilised by the addition of a highly purified recombinant human serum albumin. The non-albumin protein may be Factor VIII.

[0242] In a further aspect the present invention relates to a method of preparing a long acting biologically active SorCS1 compound, such as any one of the herein disclosed conjugates of the present invention, comprising a SorCS1 polypeptide linked to a pharmaceutically acceptable molecule, the method comprising reacting a SorCS1 with a linker attached to a pharmaceutically acceptable molecule, or reacting a SorCS1 polypeptide with a linker and then attaching said linker to a pharmaceutically acceptable molecule, or reacting a linker with a pharmaceutically acceptable molecule and then reacting a SorCS1 polypeptide with the linker attached to the pharmaceutically acceptable molecule, or by expressing the SorCS1 polypeptide and the pharmaceutically acceptable molecule from a host cell.

[0243] In one embodiment the present invention relates to a long-acting modified mammalian SorCS1, e.g. human SorCS1 linked to such as fused to albumin, or conjugated to an acylation group or PEG and provides an in vivo plasma half-life of the mammalian SorCS1 or analog thereof, or the modified SorCS1 polypeptide which is from 2 to 48 hours in a mammal. The modified long acting SorCS1 is believed to improve patient convenience and treatment outcome by reducing the frequency of SorCS1 administration.

[0244] In another embodiment, increased halflife is obtained by use of a sustained delivery system or slow release delivery. For example, liposomes are well-known drug carriers, which could be employed for delivery of polypeptides of the present invention. In this case, liposomes could be produced, which comprise a SorCS1 polypeptide of the invention. Sustained delivery systems based on the biodegradable polymers poly(lactic acid) (PLA) and poly(lactic/glycolic acid) (PLGA) are also suitable for delivery of polypeptide drugs of the present invention.

[0245] In one embodiment the agent of the invention is modified in order to increase its half-life when administered to a patient, in particular its plasma half-life. The modification may be in the form of a moiety conjugated to the agent of the invention, thus generating a moiety-conjugated agent, wherein said moiety-conjugated agent has a plasma and/or serum half-life being longer than the plasma and/or serum half-life of the non-moiety conjugated agent. In one such embodiment the moiety conjugated to the agent is one or more type of moieties selected from the group consisting of albumin and variants thereof, fatty acids, polyethylene glycol (PEG), acylation groups, antibodies and antibody fragments. The conjugation of the moiety to the polypeptide of the invention may be to any suitable amino acid residue (backbone or side chain) of the polypeptide of the invention. The moiety may also be conjugated to polypeptide of the invention by a linker. In certain embodiments said linker has a sequence selected from the group consisting of SEQ ID NO:67, 68, 69, 70 and 71.

[0246] In one embodiment the moiety conjugated to the polypeptide according to the present invention is a moiety which facilitates transport across the blood brain barrier (BBB). An example of such a cross-BBB transport facilitator is an antibody from a camelid species. Camelids such as dromedaries, camels, llamas, alpacas, vicuñas, and guanacos have single-chain antibodies capable of crossing the BBB. The person of skill in the art is aware of how to See Li et al (2012) FASEB J. (10):3969-79

### Nucleic Acid, Vectors and Host Cells

[0247] As mentioned herein above, the present invention also comprises nucleotides capable of encoding the polypeptide as defined herein above, such as wherein the encoded polypeptide has at least 60%, e.g. 65%, e.g. 70%, e.g. 75%, such as 80%, e.g. 85%, such as 90%, e.g. 95%, such as 98%, e.g. 99% sequence identity to a sequence selected from the group consisting of SEQ ID NOs: 1, 2, 3, 4, 5, 6, 7, 8, 9, 10, 11, 12, 13, 14, 15, 16, 17, 18, 19, 20, 21, 22, 23, 24, 25, 26, 27, 28, 29, 30, 31, 32, 33, 34, 35, 36, 37, 38, 39, 40, 41, 42, 43, 44, 45, 46, 47, 48, 49, 50, 51, 52, 53 and 54 or to a fragment thereof.

[0248] In one aspect the invention relates to a vector, said vector comprising at least one nucleotide as defined herein above, for use in a method of reducing appetite in an individual.

[0249] In another aspect the invention relates to a vector, said vector comprising at least one nucleotide as defined herein above, for use in a method for promoting weight loss.

[0250] In another aspect the invention relates to a vector, said vector comprising at least one nucleotide as defined herein above, for use in a method for treating obesity.

[0251] In another aspect the invention relates to a vector, said vector comprising at least one nucleotide as defined herein above, for use in a method for increasing metabolism.

[0252] In another aspect the invention relates to a vector, said vector comprising at least one nucleotide as defined herein above, for use in a method for increasing thermogenesis.

[0253] In another aspect the invention relates to a vector, said vector comprising at least one nucleotide as defined herein above, for use in an in vivo and/or an in vitro method for converting white fat into brown fat.

[0254] The vector of the invention may further comprise a promoter which may be operably linked to the nucleic acid molecule of the invention. The promoter may be selected from, but is not limited to the group consisting of: CMV, human UbiC, RSV, Tet-regulatable promoter, Mo-MLV-LTR, Mx1, EF-1alpha, PDGF beta and CaMK II. The vector of the invention may also be selected from the group consisting of vectors derived from the Retroviridae family including lentivirus, HIV, SIV, FIV, EAIV, CIV. Other vectors of the invention are selected from the group consisting of adeno associated virus, adenovirus, alphavirus, baculovirus, HSV, coronavirus, Bovine papilloma virus, Mo-MLV, preferably adeno associated virus.

[0255] In another embodiment, the invention relates to a host cell comprising the nucleic acid as described above, wherein the isolated host cell is transformed or transduced with at least one vector as defined herein above. Thus the host cell may be implanted naked or in a biocompatible capsule thus producing the polypeptide of the present invention.

[0256] In one aspect the invention relates to a host cell comprising at least one nucleotide as defined herein above, for use in a method of reducing appetite in an individual.

[0257] In another aspect the invention relates to a host cell comprising at least one nucleotide as defined herein above, for use in a method for promoting weight loss.

[0258] In another aspect the invention relates to a host cell comprising at least one nucleotide as defined herein above, for use in a method for treating obesity.

[0259] In another aspect the invention relates to a host cell comprising at least one nucleotide as defined herein above, for use in a method for increasing metabolism.

[0260] In another aspect the invention relates to a host cell comprising at least one nucleotide as defined herein above, for use in a method for increasing thermogenesis.

[0261] In another aspect the invention relates to a host cell comprising at least one nucleotide as defined herein above, for use in an in vivo and/or an in vitro method for converting white fat into brown fat.

[0262] The isolated host may be selected from the group consisting of Saccharomyces cerevisiae, E. coli, Aspergillus and Sf9 insect cells and of mammalian cells selected from the group consisting of human, feline, porcine, simian, canine, murine and rat cells, wherein the mammalian cell may be selected from, but is not limited to the group consisting of muscle cells, hepatocytes, adipocytes and cells of the pancreas such as α cells, β cells and δ cells.

[0263] In one embodiment the isolated host cell is selected from the group consisting of CHO, CHO-K1, HEI193T, HEK293, COS, PC12, HiB5, RN33b and BHK cells.

[0264] In one embodiment the host cell is a human stem cell, and in another embodiment the host cell is not a human stem cell.

[0265] As discussed above the agent of the invention is any agent having the biological activity as demonstrated in the examples for soluble SorCS1 in relation to reducing appetite, and/or supressing hunger and/or reducing prospective consumption, and/or for promoting weight loss, and/or for treating obesity, and/or for increasing metabolism, and/or for increasing thermogenesis in a mammal, and/or for converting white fat into brown fat in vivo or in an in vitro cell culture. While it is preferred that the agent is a polypeptide, the agent may in principle be any type of molecule exhibiting the same biological response as a SorCS1 polypeptide, such as other polypeptides, in particular other Vps10p-domain receptors, antibodies as well as small organic molecules, wherein the antibody may be selected from the group consisting of: polyclonal antibodies, monoclonal antibodies, humanised antibodies, single chain antibodies and recombinant antibodies.

[0266] Furthermore, as discussed herein administration of nucleic acids either naked, or in host cells or packaging cells, wherein the nucleic acid is capable of encoding the SorCS1 polypeptide(s) as discussed herein, for the reduction of appetite, supression of hunger or reduction of desire to eat, is also an aspect of the invention.

### Methods of Screening for Agents of the Invention

[0267] The present invention provides specific targets and methods for screening and evaluating further candidate agents including SorCS1 peptide and polypeptide fragments and mutant and variants thereof.

[0268] While the screening of a large number of peptides for a certain physiological activity may be a laborious undertaking, the exact disclosures of the assay herein to be carried out enables the skilled person to reproduce the present invention without undue burden of experimentation and without needing inventive skill.

[0269] For this purpose screening libraries of candidate agents are readily available for purchase on the market. Whether a library is a peptide library or a chemical library does not have any impact in the present situation since screening of chemical libraries is also routine work. In fact screening of chemical libraries is a service offered by commercial companies, and it is clear from their presentation material that they do not consider the screening work as such to be inventive.

[0270] Initially in the process of screening for SorCS1-like agents i.e. agents exhibit the same biological response as SorCS1 such as reduction of appetite, promotion of weight loss, treatment of obesity, increased metabolism, increased thermogenesis, and/or conversion of white fat into brown fat, it is relevant to perform studies as discussed herein to verify that the agent is biologically active. As herein, this may be done indirectly by showing that administration of the SorCS1-like agent in fact results in a reduced appetite in a test model such as a mouse.

[0271] Accordingly, in one embodiment the present invention relates to an in vivo and/or in vitro method for screening for the ability of the SorCS1-like agent as defined herein above to reduce appetite, promote weight loss, treat obesity, increase metabolism, increase thermogenesis, and/or convert white fat into brown fat,

### Pharmaceutical Composition and Administration Forms

[0272] The present invention also encompasses pharmaceutical compositions comprising the agent as defined herein. In the present context the term agent and compound is considered synonyms when discussing the pharmaceutical composition.

[0273] In the present context, the term “a pharmaceutical composition” as used herein typically means a composition containing SorCS1 and/or a SorCS1 variant of the present invention, and optionally one or more pharmaceutically acceptable carriers or excipients, and may be prepared by conventional techniques, e.g. as described in Remington: The Science and Practice of Pharmacy 1995, edited by E. W. Martin, Mack Publishing Company, 19th edition, Easton, Pa. The compositions may appear in conventional forms, for example capsules, tablets, aerosols, solutions, suspensions or topical applications. Typically, the pharmaceutical compositions of the present invention may be formulated for parenteral administration e.g., by i.v. or subcutaneous injection, and may be presented in unit dose form in ampoules, pre-filled syringes, small volume infusion or in multi-dose containers with an added preservative. The compositions may take such forms as suspensions, solutions, or emulsions in oily or aqueous vehicles, for example solutions in aqueous polyethylene glycol. Examples of oily or nonaqueous carriers, diluents, solvents or vehicles include propylene glycol, polyethylene glycol, vegetable oils (e.g., olive oil), and injectable organic esters (e.g., ethyl oleate), and may contain formulatory agents such as preserving, wetting, emulsifying or suspending, stabilizing and/or dispersing agents. Alternatively, the active ingredient may be in powder form, obtained by aseptic isolation of sterile solid or by lyophilisation from solution for constitution before use with a suitable vehicle, e.g., sterile, pyrogen-free water. Oils useful in parenteral formulations include petroleum, animal, vegetable, or synthetic oils. Specific examples of oils useful in such formulations include peanut, soybean, sesame, cottonseed, corn, olive, petrolatum, and mineral. Suitable fatty acids for use in parenteral formulations include oleic acid, stearic acid, and isostearic acid. Ethyl oleate and isopropyl myristate are examples of suitable fatty acid esters. The parenteral formulations typically will contain from about 0.0001 to about 25%, such as from about 0.5 to about 25%, by weight of the active ingredient in solution. Preservatives and buffers may be used. In order to minimise or eliminate irritation at the site of injection, such compositions may contain one or more nonionic surfactants having a hydrophile-lipophile balance (HLB) of from about 12 to about 17. The quantity of surfactant in such formulations will typically range from about 0.000001 to about 15% by weight, such as from about 0.000001 to about 5% by weight or from about 5 to about 15% by weight. Suitable surfactants include polyethylene sorbitan fatty acid esters, such as sorbitan monooleate and the high molecular weight adducts of ethylene oxide with a hydrophobic base, formed by the condensation of propylene oxide with propylene glycol. The parenteral formulations can be presented in unit-dose or multi-dose sealed containers, such as ampoules and vials, and can be stored in a freeze-dried (lyophilized) condition requiring only the addition of the sterile liquid excipient, for example, water, for injections, immediately prior to use.

[0274] The main route of drug delivery according to this invention is however parenteral in order to introduce the agent into the blood stream to ultimately target the relevant tissue.

[0275] The agent may also be administered to cross any mucosal membrane of an animal to which the biologically active substance is to be given, e.g. in the nose, vagina, eye, mouth, genital tract, lungs, gastrointestinal tract, or rectum, preferably the mucosa of the nose, or mouth.

[0276] In a preferred embodiment the agent of the invention is administered parenterally, that is by intravenous, intramuscular, subcutaneous intranasal, intrarectal, intravaginal or intraperitoneal administration. The subcutaneous and intramuscular forms of parenteral administration are generally preferred. Appropriate dosage forms for such administration may be prepared by conventional techniques. The compounds may also be administered by inhalation, which is by intranasal and oral inhalation administration. Appropriate dosage forms for such administration, such as an aerosol formulation or a metered dose inhaler, may be prepared by conventional techniques.

[0277] In one embodiment the pharmaceutical composition according to the present invention is formulated for parenteral administration such as by injection.

[0278] In a further embodiment the pharmaceutical composition according to the present invention is formulated for intravenous, intramuscular, intraspinal, intraperitoneal, subcutaneous, a bolus or a continuous administration.

[0279] The rate and frequency of the administration may be determined by the physician from a case to case basis. In one embodiment the administration occurs at intervals of 30 minutes to 24 hours, such as at intervals of 1 to 6 hours.

[0280] The duration of the treatment may vary depending on severity of the condition. In one embodiment the duration of the treatment is from 6 to 72 hours. In chronic cases the duration of the treatment may be lifelong.

[0281] The dosage can be determined by the physician in charge based on the characteristics of the patient and the means and mode of administration. In one embodiment of the present invention, the dosage of the active ingredient of the pharmaceutical composition as defined herein above, is between 10 μg to 500 mg per kg body mass, such as between 20 μg and 400 mg, e.g. between 30 μg and 300 mg, such as between 40 μg and 200 mg, e.g. between 50 μg and 100 mg, such as between 60 μg and 90 μg, e.g. between 70 μg and 80 μg.

[0282] The dosage may be administered as a bolus administration or as a continuous administration. In relation to bolus administration the pharmaceutical composition may be administered at intervals of 30 minutes to 24 hours, such as at intervals of 1 to 6 hours. When the administration is continuous it is administered over an interval of time that normally is from 6 hours to 7 days. However, normally the dosage will be administered as a bolus 1-3 times per day.

### Formulations

[0283] Whilst it is possible for the compounds or salts of the present invention to be administered as the raw chemical, it is preferred to present them in the form of a pharmaceutical formulation. Accordingly, the present invention further provides a pharmaceutical formulation, for medicinal application, which comprises a compound of the present invention or a pharmaceutically acceptable salt thereof, as herein defined, and a pharmaceutically acceptable carrier therefore.

[0284] In one embodiment the pharmaceutical composition as defined herein above comprises a pharmaceutically acceptable carrier.

[0285] The agents of the present invention may be formulated into a wide variety dosage forms, suitable for the various administration forms discussed above.

[0286] The pharmaceutical compositions and dosage forms may comprise the agents of the invention or its pharmaceutically acceptable salt or a crystal form thereof as the active component.

[0287] Furthermore, the pharmaceutical compositions may comprises pharmaceutically acceptable carriers that can be either solid or liquid.

[0288] Solid form preparations are normally provided for oral or enteral administration, such as powders, tablets, pills, capsules, cachets, suppositories, and dispersible granules. A solid carrier can be one or more substances which may also act as diluents, flavoring agents, solubilizers, lubricants, suspending agents, binders, preservatives, wetting agents, tablet disintegrating agents, or an encapsulating material.

[0289] Preferably, the composition will be about 0.5% to 75% by weight of a compound or compounds of the invention, with the remainder consisting of suitable pharmaceutical excipients. For oral administration, such excipients include pharmaceutical grades of mannitol, lactose, starch, magnesium stearate, sodium saccharine, talcum, cellulose, glucose, gelatin, sucrose, magnesium carbonate, and the like.

[0290] In powders, the carrier is a finely divided solid which is a mixture with the finely divided active component. In tablets, the active component is mixed with the carrier having the necessary binding capacity in suitable proportions and compacted in the shape and size desired. Powders and tablets preferably contain from one to about seventy percent of the active compound. Suitable carriers are magnesium carbonate, magnesium stearate, talc, sugar, lactose, pectin, dextrin, starch, gelatin, tragacanth, methylcellulose, sodium carboxymethylcellulose, a low melting wax, cocoa butter, and the like. The term “preparation” is intended to include the formulation of the active compound with encapsulating material as carrier providing a capsule in which the active component, with or without carriers, is surrounded by a carrier, which is in association with it. Similarly, cachets and lozenges are included. Tablets, powders, capsules, pills, cachets, and lozenges can be as solid forms suitable for oral administration.

[0291] Drops according to the present invention may comprise sterile or non-sterile aqueous or oil solutions or suspensions, and may be prepared by dissolving the active ingredient in a suitable aqueous solution, optionally including a bactericidal and/or fungicidal agent and/or any other suitable preservative, and optionally including a surface active agent. The resulting solution may then be clarified by filtration, transferred to a suitable container which is then sealed and sterilized by autoclaving or maintaining at 98-100° C. for half an hour. Alternatively, the solution may be sterilized by filtration and transferred to the container aseptically. Examples of bactericidal and fungicidal agents suitable for inclusion in the drops are phenylmercuric nitrate or acetate (0.002%), benzalkonium chloride (0.01%) and chlorhexidine acetate (0.01%). Suitable solvents for the preparation of an oily solution include glycerol, diluted alcohol and propylene glycol.

[0292] Also included are solid form preparations which are intended to be converted, shortly before use, to liquid form preparations for oral administration. Such liquid forms include solutions, suspensions, and emulsions. These preparations may contain, in addition to the active component, colorants, flavours, stabilizers, buffers, artificial and natural sweeteners, dispersants, thickeners, solubilizing agents, and the like.

[0293] Other forms suitable for oral administration include liquid form preparations including emulsions, syrups, elixirs, aqueous solutions, aqueous suspensions, toothpaste, gel dentrifrice, chewing gum, or solid form preparations which are intended to be converted shortly before use to liquid form preparations. Emulsions may be prepared in solutions in aqueous propylene glycol solutions or may contain emulsifying agents such as lecithin, sorbitan monooleate, or acacia. Aqueous solutions can be prepared by dissolving the active component in water and adding suitable colorants, flavours, stabilizing and thickening agents. Aqueous suspensions can be prepared by dispersing the finely divided active component in water with viscous material, such as natural or synthetic gums, resins, methylcellulose, sodium carboxymethylcellulose, and other well known suspending agents. Solid form preparations include solutions, suspensions, and emulsions, and may contain, in addition to the active component, colorants, flavours, stabilizers, buffers, artificial and natural sweeteners, dispersants, thickeners, solubilizing agents, and the like.

[0294] The compounds of the present invention may be formulated for parenteral administration (e.g., by injection, for example bolus injection or continuous infusion) and may be presented in unit dose form in ampoules, pre-filled syringes, small volume infusion or in multi-dose containers with an added preservative. The compositions may take such forms as suspensions, solutions, or emulsions in oily or aqueous vehicles, for example solutions in aqueous polyethylene glycol. Examples of oily or nonaqueous carriers, diluents, solvents or vehicles include propylene glycol, polyethylene glycol, vegetable oils (e.g., olive oil), and injectable organic esters (e.g., ethyl oleate), and may contain formulatory agents such as preserving, wetting, emulsifying or suspending, stabilizing and/or dispersing agents. Alternatively, the active ingredient may be in powder form, obtained by aseptic isolation of sterile solid or by lyophilisation from solution for constitution before use with a suitable vehicle, e.g., sterile, pyrogen-free water.

[0295] Oils useful in parenteral formulations include petroleum, animal, vegetable, or synthetic oils. Specific examples of oils useful in such formulations include peanut, soybean, sesame, cottonseed, corn, olive, petrolatum, and mineral. Suitable fatty acids for use in parenteral formulations include oleic acid, stearic acid, and isostearic acid. Ethyl oleate and isopropyl myristate are examples of suitable fatty acid esters.

[0296] Suitable soaps for use in parenteral formulations include fatty alkali metal, ammonium, and triethanolamine salts, and suitable detergents include (a) cationic detergents such as, for example, dimethyl dialkyl ammonium halides, and alkyl pyridinium halides; (b) anionic detergents such as, for example, alkyl, aryl, and olefin sulfonates, alkyl, olefin, ether, and monoglyceride sulfates, and sulfosuccinates, (c) nonionic detergents such as, for example, fatty amine oxides, fatty acid alkanolamides, and polyoxyethylenepolypropylene copolymers, (d) amphoteric detergents such as, for example, alkyl-.beta.-aminopropionates, and 2-alkyl-imidazoline quaternary ammonium salts, and (e) mixtures thereof.

[0297] The parenteral formulations typically will contain from about 0.5 to about 25% by weight of the active ingredient in solution. Preservatives and buffers may be used. In order to minimize or eliminate irritation at the site of injection, such compositions may contain one or more nonionic surfactants having a hydrophile-lipophile balance (HLB) of from about 12 to about 17. The quantity of surfactant in such formulations will typically range from about 5 to about 15% by weight. Suitable surfactants include polyethylene sorbitan fatty acid esters, such as sorbitan monooleate and the high molecular weight adducts of ethylene oxide with a hydrophobic base, formed by the condensation of propylene oxide with propylene glycol. The parenteral formulations can be presented in unit-dose or multi-dose sealed containers, such as ampules and vials, and can be stored in a freeze-dried (lyophilized) condition requiring only the addition of the sterile liquid excipient, for example, water, for injections, immediately prior to use. Extemporaneous injection solutions and suspensions can be prepared from sterile powders, granules, and tablets of the kind previously described.

[0298] The compounds of the invention can also be delivered topically for transdermal or transmucosal administration. Regions for topical administration include the skin surface and also mucous membrane tissues of the vagina, rectum, nose, mouth, and throat. Compositions for topical administration via the skin and mucous membranes should not give rise to signs of irritation, such as swelling or redness. Transdermal administration typically involves the delivery of a pharmaceutical agent for percutaneous passage of the drug into the systemic circulation of the patient. The skin sites include anatomic regions for transdermally administering the drug and include the forearm, abdomen, chest, back, buttock, mastoidal area, and the like.

[0299] The topical composition may include a pharmaceutically acceptable carrier adapted for topical administration. Thus, the composition may take the form of a suspension, solution, ointment, lotion, sexual lubricant, cream, foam, aerosol, spray, suppository, implant, inhalant, tablet, such as a sublingual tablet, capsule, dry powder, syrup, balm or lozenge, for example. Methods for preparing such compositions are well known in the pharmaceutical industry.

[0300] The compounds of the present invention may be formulated for topical administration to the epidermis as ointments, creams or lotions, or as a transdermal patch. Ointments and creams may, for example, be formulated with an aqueous or oily base with the addition of suitable thickening and/or gelling agents. Lotions may be formulated with an aqueous or oily base and will in general also containing one or more emulsifying agents, stabilizing agents, dispersing agents, suspending agents, thickening agents, or colouring agents. Formulations suitable for topical administration in the mouth include lozenges comprising active agents in a flavoured base, usually sucrose and acacia or tragacanth; pastilles comprising the active ingredient in an inert base such as gelatin and glycerin or sucrose and acacia; and mouthwashes comprising the active ingredient in a suitable liquid carrier.

[0301] Creams, ointments or pastes according to the present invention are semi-solid formulations of the active ingredient for external application. They may be made by mixing the active ingredient in finely-divided or powdered form, alone or in solution or suspension in an aqueous or non-aqueous fluid, with the aid of suitable machinery, with a greasy or non-greasy base. The base may comprise hydrocarbons such as hard, soft or liquid paraffin, glycerol, beeswax, a metallic soap; a mucilage; an oil of natural origin such as almond, corn, arachis, castor or olive oil; wool fat or its derivatives or a fatty acid such as steric or oleic acid together with an alcohol such as propylene glycol or a macrogel. The formulation may incorporate any suitable surface active agent such as an anionic, cationic or nonionic surfactant such as a sorbitan ester or a polyoxyethylene derivative thereof. Suspending agents such as natural gums, cellulose derivatives or inorganic materials such as silicaceous silicas, and other ingredients such as lanolin, may also be included.

[0302] Lotions according to the present invention include those suitable for application to the skin or eye. An eye lotion may comprise a sterile aqueous solution optionally containing a bactericide and may be prepared by methods similar to those for the preparation of drops. Lotions or liniments for application to the skin may also include an agent to hasten drying and to cool the skin, such as an alcohol or acetone, and/or a moisturizer such as glycerol or an oil such as castor oil or arachis oil.

[0303] Transdermal delivery may be accomplished by exposing a source of the complex to a patient's skin for an extended period of time. Transdermal patches have the added advantage of providing controlled delivery of a pharmaceutical agent-chemical modifier complex to the body. See Transdermal Drug Delivery: Developmental Issues and Research Initiatives, Hadgraft and Guy (eds.), Marcel Dekker, Inc., (1989); Controlled Drug Delivery: Fundamentals and Applications, Robinson and Lee (eds.), Marcel Dekker Inc., (1987); and Transdermal Delivery of Drugs, Vols. 1-3, Kydonieus and Berner (eds.), CRC Press, (1987). Such dosage forms can be made by dissolving, dispersing, or otherwise incorporating the pharmaceutical agent-chemical modifier complex in a proper medium, such as an elastomeric matrix material. Absorption enhancers can also be used to increase the flux of the compound across the skin. The rate of such flux can be controlled by either providing a rate-controlling membrane or dispersing the compound in a polymer matrix or gel.

[0304] For example, a simple adhesive patch can be prepared from a backing material and an acrylate adhesive. The pharmaceutical agent-chemical modifier complex and any enhancer are formulated into the adhesive casting solution and allowed to mix thoroughly. The solution is cast directly onto the backing material and the casting solvent is evaporated in an oven, leaving an adhesive film. The release liner can be attached to complete the system.

[0305] Foam matrix patches are similar in design and components to the liquid reservoir system, except that the gelled pharmaceutical agent-chemical modifier solution is constrained in a thin foam layer, typically a polyurethane. This foam layer is situated between the backing and the membrane which have been heat sealed at the periphery of the patch.

[0306] For passive delivery systems, the rate of release is typically controlled by a membrane placed between the reservoir and the skin, by diffusion from a monolithic device, or by the skin itself serving as a rate-controlling barrier in the delivery system. See U.S. Pat. Nos. 4,816,258; 4,927,408; 4,904,475; 4,588,580, 4,788,062; and the like. The rate of drug delivery will be dependent, in part, upon the nature of the membrane. For example, the rate of drug delivery across membranes within the body is generally higher than across dermal barriers. The rate at which the complex is delivered from the device to the membrane is most advantageously controlled by the use of rate-limiting membranes which are placed between the reservoir and the skin. Assuming that the skin is sufficiently permeable to the complex (i.e., absorption through the skin is greater than the rate of passage through the membrane), the membrane will serve to control the dosage rate experienced by the patient.

[0307] Suitable permeable membrane materials may be selected based on the desired degree of permeability, the nature of the complex, and the mechanical considerations related to constructing the device. Exemplary permeable membrane materials include a wide variety of natural and synthetic polymers, such as polydimethylsiloxanes (silicone rubbers), ethylenevinylacetate copolymer (EVA), polyurethanes, polyurethane-polyether copolymers, polyethylenes, polyamides, polyvinylchlorides (PVC), polypropylenes, polycarbonates, polytetrafluoroethylenes (PTFE), cellulosic materials, e.g., cellulose triacetate and cellulose nitrate/acetate, and hydrogels, e.g., 2-hydroxyethylmethacrylate (HEMA).

[0308] The compounds of the present invention may also be formulated for administration as suppositories. A low melting wax, such as a mixture of fatty acid glycerides or cocoa butter is first melted and the active component is dispersed homogeneously, for example, by stirring. The molten homogeneous mixture is then poured into convenient sized molds, allowed to cool, and to solidify.

[0309] The active compound may be formulated into a suppository comprising, for example, about 0.5% to about 50% of a compound of the invention, disposed in a polyethylene glycol (PEG) carrier (e.g., PEG 1000 [96%] and PEG 4000 [4%].

[0310] The compounds of the present invention may be formulated for vaginal administration. Pessaries, tampons, creams, gels, pastes, foams or sprays containing in addition to the active ingredient such carriers as are known in the art to be appropriate.

[0311] The compounds of the present invention may be formulated for nasal administration. The solutions or suspensions are applied directly to the nasal cavity by conventional means, for example with a dropper, pipette or spray. The formulations may be provided in a single or multidose form. In the latter case of a dropper or pipette this may be achieved by the patient administering an appropriate, predetermined volume of the solution or suspension. In the case of a spray this may be achieved for example by means of a metering atomizing spray pump.

[0312] The compounds of the present invention may be formulated for aerosol administration, particularly to the respiratory tract and including intranasal administration. The compound will generally have a small particle size for example of the order of 5 microns or less. Such a particle size may be obtained by means known in the art, for example by micronization. The active ingredient is provided in a pressurized pack with a suitable propellant such as a chlorofluorocarbon (CFC) for example dichlorodifluoromethane, trichlorofluoromethane, or dichlorotetrafluoroethane, carbon dioxide or other suitable gas. The aerosol may conveniently also contain a surfactant such as lecithin. The dose of drug may be controlled by a metered valve. Alternatively the active ingredients may be provided in a form of a dry powder, for example a powder mix of the compound in a suitable powder base such as lactose, starch, starch derivatives such as hydroxypropylmethyl cellulose and polyvinylpyrrolidine (PVP). The powder carrier will form a gel in the nasal cavity. The powder composition may be presented in unit dose form for example in capsules or cartridges of e.g., gelatin or blister packs from which the powder may be administered by means of an inhaler.

[0313] When desired, formulations can be prepared with enteric coatings adapted for sustained or controlled release administration of the active ingredient.

[0314] The pharmaceutical preparations are preferably in unit dosage forms. In such form, the preparation is subdivided into unit doses containing appropriate quantities of the active component. The unit dosage form can be a packaged preparation, the package containing discrete quantities of preparation, such as packeted tablets, capsules, and powders in vials or ampoules. Also, the unit dosage form can be a capsule, tablet, cachet, or lozenge itself, or it can be the appropriate number of any of these in packaged form.

### Pharmaceutically Acceptable Salts

[0315] Pharmaceutically acceptable salts of the instant compounds, where they can be prepared, are also intended to be covered by this invention. These salts will be ones which are acceptable in their application to a pharmaceutical use. By that it is meant that the salt will retain the biological activity of the parent compound and the salt will not have untoward or deleterious effects in its application and use in treating diseases.

[0316] Pharmaceutically acceptable salts are prepared in a standard manner. If the parent compound is a base it is treated with an excess of an organic or inorganic acid in a suitable solvent. If the parent compound is an acid, it is treated with an inorganic or organic base in a suitable solvent.

[0317] The compounds of the invention may be administered in the form of an alkali metal or earth alkali metal salt thereof, concurrently, simultaneously, or together with a pharmaceutically acceptable carrier or diluent, especially and preferably in the form of a pharmaceutical composition thereof, whether by oral, rectal, or parenteral (including subcutaneous) route, in an effective amount.

[0318] Examples of pharmaceutically acceptable acid addition salts for use in the present inventive pharmaceutical composition include those derived from mineral acids, such as hydrochloric, hydrobromic, phosphoric, metaphosphoric, nitric and sulfuric acids, and organic acids, such as tartaric, acetic, citric, malic, lactic, fumaric, benzoic, glycolic, gluconic, succinic, p-toluenesulphonic acids, and arylsulphonic, for example.

[0319] The pH of the pharmaceutical composition may be any pH suitable for physiological purposes such as between pH 4 and pH 9, preferably between 5 and 8, more preferably around pH 7.

### Kit of Parts

[0320] In one aspect the present invention relates to a kit in parts comprising:
[0321] a pharmaceutical composition as defined herein above
[0322] a medical instrument or other means for administering the medicament
[0323] instructions on how to use the kit in parts.
[0324] optionally a second active ingredient as defined herein above

[0325] In a further embodiment the instrument as defined herein above is a so called insulin pen described in US Pat. Nos. 5,462,535, U.S. Pat. No. 5,999,323 and U.S. Pat. No. 5,984,906.

[0326] The second ingredient may be any suitable active ingredient normally administered to individuals suffering from obesity or overweight.

[0327] In a further aspect the invention relates to a pharmaceutical composition comprising the agent as defined above; or the isolated nucleic acid sequence as defined above; or the expression vector as defined above; or a composition of host cells as defined above; or a packaging cell line as defined above, or a combination thereof.

### EXAMPLES

### Example 1

### Gene Expression Profiling of Adipose Tissue from SorCS1 Knockout Mice by PCR Arrays

[0328] To examine the gene expression profile of SorCS1 knockout mice, the expression of 84 genes related to the mouse insulin signalling pathway and 84 genes related to mouse lipoprotein signalling & cholesterol metabolism was determined using microarray analysis. The microarray analysis was performed using RNA from adipose tissue of SorCS1 knockout wild-type adipose mice. In practice, first strand cDNA was synthesized from total RNA (Applied Biosystems) from SorCS1 knockout (−/−) and wild-type (+/+) adipose tissue from female mice 50 weeks of age (n=3). Then superarray of Mouse Insulin Signalling Pathway (PAMM-030A RT2 Profiler PCR arrays) or B) the type Mouse Lipoprotein Signalling & Cholesterol Metabolism (PAMM-080-A RT2 Profiler PCR arrays) were processed using an ABI7900 platform (Applied Biosystems) and SYBR Green/Rox PCR (SABiosciences). AROS Applied Biotechnology, Aarhus, Denmark, did the expression analyses. Genes showing an expression more than 3 times up- or down-regulated in the SorCS1 knockout mice when compared to wild-type mice are listed in the upper tables and their known functions are indicated in the table below. The data in FIG. 2A+B shows that the expression of several genes are changed in the SorCS1 knockout mice compared to the wild-type mice, indicating that insulin and cholesterol signalling pathways and metabolism are altered in SorCS1 knockout mice.

### Example 2

### Reduced Weight in Diabetic Db/Db Mice after Over-Expression of Soluble SorCS1

[0329] To evaluate the effect of soluble SorCS1 on weight in an obese mouse model that spontaneously develops type 2 diabetes, we used the db/db mouse strain (BKS.Cg-m+/+Lpr^{db}/BomTac from Taconic). These mice lack the leptin receptor and consequently the mice become obese and develop insulin resistance and finally severe diabetes at the age of 6-8 weeks.

[0330] We injected adenovirus expressing either human soluble (hsol.) SorCS1 or LacZ as a control, to examine the effect on weight. Recombinant adenovirus for expression of human soluble SorCS1 (hsol.SorCS1) was generated as follows: pcDNA3.1/Zeo(−)/hsol.SorCS1 encoding the human soluble SorCS1 cDNA (amino acids 1-1100) was digested with Pme1 and Apa1 and the fragment encoding hsol.SorCS1 inserted into the shuttle plasmid pVQpacAd5CMVK-NpA (ViraQuest Inc, North Liberty, Iowa). ViraQuest Inc, North Liberty, Iowa, then used this shuttle plasmid for generation and propagation of adenovirus over-expressing hsol. SorCS1. Adenovirus expressing LacZ as a negative control was obtained from ViraQuest Inc, North Liberty, Iowa

[0331] In detail, db/db female mice 6 weeks of age were injected in the tail vein with 2E9 pfu's of an adenoviral vector with either hsol.SorCS1 or LacZ (from ViraQuest Inc, North Liberty, Iowa) as a negative control virus. In the morning, on day 0, 9, 14 and day 16, the mice were weighed on a scale. Data are means±SEM for 5 mice in each group. On day 9 to 16, the db/db female mice with over-expression of soluble SorCS1 exhibited a significant decrease in weight compared to the mice that received the control LacZ virus. Thus, over-expression of soluble SorCS1 improves the obese status in this obese mouse model. The results are illustrated in FIG. 3

### Example 3

### Reduced Food Intake and Weight in Diabetic Db/Db Mice after Over-Expression of Soluble SorCS1

[0332] To evaluate the effect of soluble SorCS1 on weight in an obese mouse model that spontaneously develops type 2 diabetes, we used the db/db mouse strain (BKS.Cg-m+/+Lpr^{db}/BomTac from Taconic). These mice lack the leptin receptor and consequently the mice become obese and develop insulin resistance and finally severe diabetes at the age of 6-8 weeks. We injected adenovirus expressing either hsol.SorCS1 or LacZ as a control (see example 2), to examine the effect on weight. In detail, db/db female mice 6 weeks of age were injected in the tail vein with 2E9 pfu's of an adenoviral vector with either hsol.SorCS1 or LacZ (from ViraQuest Inc, North Liberty, Iowa) as a negative control virus. A) In the morning of day 9 after virus treatment each mouse was moved to a metabolic cage with a measured amount of food. 24 hours later the mouse was moved back to a normal mouse cage and the food in the metabolic cage was weighed to determine the food intake. The amount of ingested food over 24 hours is shown in FIG. 4A Data are means±SEM for 4 mice in each group. Mice with over-expression of soluble SorCS1 ate significant less than the control mice expressing LacZ. B) In the morning, on day 0 and 11 after virus treatment, the mice were weighed on a scale. The relative weight changes over the time period are shown. Data are means±SEM for 4 mice in each group. On day 11, the db/db female mice with over-expression of soluble SorCS1 exhibited a significant decrease in body weight compared to the mice that received the control LacZ virus. The results are illustrated in FIG. 4B

### Example 4

### Administering of Soluble SorCS1 or SorCS1 Peptides for the Treatment of Obesity

[0333] The soluble domain of mouse SorCS1 peptide(s) which is capable of binding to IR is expressed recombinantly in large scale, in a mammalian cell culture and is subsequently purified by for example immune-affinity chromatography. The protein or peptide is administered by peritoneal, intravenous, intramuscular or subcutaneous injection to e.g. an obese animal model (ob/ob or db/db mouse model) showing massive obesity (1 mg to 1 g/kg body weight each day or every week) in parallel with a wild type reference mouse. Good effect is obtained, and the same methods using human SorCS1 are applied for patients with obesity.

### Example 5

### Studies in Isolated Primary Adipocytes from Obese Mice

[0334] Primary cultures of adipocytes are isolated from obese mice (db/db or ob/ob) and treated with soluble SorCS1 or a control protein (delivered either as a virus or directly as a protein). Morphology and amount of adipokines are studied, and tested for ³H-glucose uptake in the different cell lines. Studies are undertaken of the insulin receptor and GLUT4 (stability, subcellular location, turnover), intracellular signaling cascades, and differentiation of primary cultures of adipocytes.

### Example 6

### Expression of Different Variants of SorCS1 in Human Adipose Tissue

[0335] Expression of SorCS1 polymorphisms and splice variants are investigated using quantitative PCR in adipose tissue from humans with obesity and/or type II diabetes.

### Example 7

### Fat Distribution in Obese Mice Treated with SorCS1 Using NMRI

[0336] Fat distribution is investigated in obese mice treated with either soluble SorCS1 or a control protein (delivered either as a virus or directly as a protein). The investigation is undertaken using NMR imaging (e.g. Siemens 3 Tesla or a custom-build 7 Tesla scanner available at the Department of Chemistry, Aarhus University, Denmark.

### Example 8

### Screening Assay for Identification of Active Polypeptides

[0337] The present assay is used to identify SorCS1 like agents having similar activity as the agents tested herein above. Such SorCS1 like agents include but is not limited to the other Vps10p-D receptors Sortilin (SEQ ID NO: 52), SorLA (SEQ ID NO: 53), SorCS2 (SEQ ID NO: 53) and SorCS3 (SEQ ID NO: 54).

[0338] Expression vectors containing nucleic acid sequences encoding candidate polypeptides such as fragments of sortilin, SorLA, SorCS2 and SorCS3 or other polypeptide and transfected into NIH 3T3-L1 mouse embryonic fibroblast cells. The pre-adipocyte 3T3-L1 cells differentiate into mature adipocytes when cultured in the presence of 0.5 M methylisobutylxanthine, 1 μM dexamethasone, 5 μg/ml insulin and 10% fetal bovine serum for 2 days. Cells are fed every 2 days with standard media without any additive for about 10 days. At that time, lipid droplets are visible by phase-contrast microscopy and the amount of the lipid droplets are measured and quantified to find the effect of the peptide on fat deposits and obesity development. Furthermore, Western Blot using antibodies against different differentiation markers, such as CCAAT/enhancer-binding proteins (C/EBPs) and peroxisome proliferator-activated receptors (PPARs), measures the effect of the different peptides on differentiation of the fibroblast into mature adipocytes.

### Example 9

### Investigation of Similar Effect of Other Vps10p Domain Receptors on Fat Distribution, Food Intake and Weight Development

[0339] To examine the effect of peptide fragments of sortilin, SorLA, SorCS2 and SorCS3 on weight gain and food intake, female db/db mice are injected with adenoviruses expressing either soluble peptide fragments of a candidate polypeptide such as sortilin/SorLA/SorCS2/SorCS3 or LacZ, as a control virus (see example 2 for generation of virus with soluble fragments). In detail, db/db female mice 6 weeks of age are injected in the tail vein with 2E9 pfu's of an adenoviral vector with either of the above mentioned VPS1 OP domain receptor fragments (which are found to have an effect on 3T3-L1 cells in example 8) or LacZ (from ViraQuest Inc, North Liberty, Iowa) as a negative control virus. In the morning of day 9 after virus treatment each mouse is moved to a metabolic cage with a measured amount of food. 24 hours later the mouse is moved back to a normal mouse cage and the food in the metabolic cage is weighed to determine the food intake. In the morning, on day 0 and 11 after virus treatment, the mice is weighed on a scale. The relative weight changes over the time period are measured. Fat distribution in the body in the mice is determined as described in example 7 using NMRI and an evaluation of the candidate polypeptide as a drug is performed.

### Example 10

### Reduced Food Intake and Weight in Obese DIO Male Mice after Over-Expression of Soluble SorCS1

[0340] To evaluate the effect of soluble SorCS1 on weight in an obese mouse model we used male mice 15 weeks of age from a diet-induced obesity (D10) mouse model (C57BL/6J DIO from Taconic). These mice have been placed on a 60 kcal % high fat diet from 6 weeks of age and as a consequence the mice become obese compared to mice on normal diet. We injected adenovirus expressing either hsol.SorCS1 or LacZ as a control to examine the effect on weight (see example 2 for virus details). In detail, DIO male mice 15 weeks of age were injected in the tail vein with 2E9 pfu's of an adenoviral vector with either hsol.SorCS1 or LacZ (from ViraQuest Inc, North Liberty, Iowa) as a negative control virus. A) In the morning of day 10 after virus treatment each group of virus treated mice were moved to a cage with a measured amount of food. Every 24 hours over the next 4 days the food in the cage were weighed to determine the food intake. The amount of eaten food over 24 hours is shown for day 11 and 14. Data are means±SEM for 5 mice in each group. Mice with over-expression of soluble SorCS1 ate significant less than the control mice expressing LacZ. The results are illustrated in FIG. 5A. B) In the morning, on day 0, 11 and 14 after virus treatment, the mice were weighed on a scale. The relative weight changes compared to day 0 over the time period are shown. Data are means±SEM for 5 mice in each group. On day 11 and 14, the DIO male mice with over-expression of soluble SorCS1 exhibited a significant decrease in weight compared to the mice that received the control LacZ virus. The results are illustrated in FIG. 5B.

### Example 11

### Reduced Food Intake and Weight in Obese and Diabetic Ob/Ob Female Mice after Over-Expression of Soluble SorCS1

[0341] To evaluate the effect of soluble SorCS1 on weight in an obese mouse model that spontaneously develops type 2 diabetes, we used the ob/ob mouse strain (B6.V-Lep^{ob}/J from Charles River). These mice lack the leptin protein so consequently the mice become obese and develop insulin resistance and finally severe diabetes at the age of 8-10 weeks. We injected adenovirus expressing either hsol.SorCS1 or LacZ as a control, to examine the effect on weight (for virus detail see example 2). In detail, ob/ob female mice 8 weeks of age were injected in the tail vein with 2E9 pfu's of an adenoviral vector with either hsol.SorCS1 or LacZ (from ViraQuest Inc, North Liberty, Iowa) as a negative control virus. A) In the morning of day 9 after virus treatment each mouse was moved to a metabolic cage with a measured amount of food. 24 hours later the mouse was moved back to a normal mouse cage and the food in the metabolic cage weight to determine the food intake. The amount of eaten food over 24 hours is shown. Data are means±SEM for 4 mice in each group. Mice with over-expression of soluble SorCS1 ate significant less than the control mice expressing LacZ. The results are illustrated in FIG. 6A. B) In the morning, on day 0 and 10 after virus treatment, the mice were weighed on a scale. The relative weight changes over the time period are shown. Data are means±SEM for 4 mice in each group. On day 10, the ob/ob female mice with over-expression of soluble SorCS1 exhibited a significant decrease in weight compared to the mice that received the control LacZ virus. The results are illustrated in FIG. 6B.

### Example 12

### Overexpression of Soluble SorCS1 by Adenovirus Increase Expression of PRDM16 and PGC-1Alpha in Adipose Tissue from Db/Db Mice

[0342] Db/db female mice 6 weeks of age were injected with 2E9 PFU/mouse of an adenovirus over-expressing soluble SorCS1 or an adenovirus over-expressing lacZ as a negative control (see example 2 for virus details). 14 days post injection gonadal adipose was harvested from the mice and subjected to quantitative RT-PCR (pPCR) to determine the expression of the specific fat genes CD137 (brite adipose tissue marker), PRDM16 and PGC-1α (brown adipose tissue marker) and GAPDH as a household gen. In detail, mRNA is isolated from adipose of db/db females injected with either hsol.SorCS1 (n=5) or lacZ (n=4) using the kit Nucleospin RNA/protein, (Macherey-Nagel). First strand cDNA was synthesized from the mRNA using a cDNA reverse transcription kit (Applied Biosystems) and then quantitative RT-PCR was performed as a TaqMan gene expression Assay (Applied Biosystems) with specific primers/probes for CD137 (Mm00441899_m1), PRDM16 (Mm00712556_m1), PGC-1α (Mm01208835-mM), GAPDH (Mm99999915_g1) (Applied Biosystems) using an Fluidigm Biomark system (48.48 chip). AROS Applied Biotechnology, Aarhus, Denmark, did the expression analyses. The array data were analyzed using the GAPDH data as internal control to normalize the sample data and it is found that mRNA from PRDM16 and PGC-1alpha are significant (p<0.05) more than 2-fold upregulated in the adipose tissue from db/db mice subjected to AV-sol.sorcs1 virus compared to the control db/db mice subjected to AV-lacZ virus. The statistical significance of difference in gene expression was assessed by student's t-test (2 tailed, 2 sample, equal variance). Several proteins are involved in the process of converting white adipose tissue (WAT) to brown adipose tissue (BAT) in mice, e.g. PRDM16 and PGC-1α. PRDM16 is selectively expressed in BAT, where it activates BAT-specific gene expression and represses WAT-specific gene expression, through an interaction with the co-receptor PGC-1α. Thus, the 2 fold up-regulation of both PRDM16 and PGC-1α in adipose tissue from db/db female mice injected with AV-sol.SorCS1 indicate that over-expression of soluble sorcs1 in the liver leads to conversion of WAT to BAT, and this could result in increased production of heat and finally less weight gain. The results are displayed in FIG. 7.

### Example 13

### Less Weight Gain in Animals, on Normal Chow (ND), Treated with Soluble SorCS1 Expressed by Adeno-Associated Virus

[0343] To evaluate the long-term effect of soluble SorCS1 on weight gain in a regular mouse, we used the C57BL6/j strain (C57BL6/j bom tac) (n=5-6 per group). The recombinant adeno-associated virus for expression of human soluble SorCS1 (hsol.SorCS1) was generated by ViraQuest (ViraQuest Inc, North Liberty, Iowa) as follows: pVQAd5CMVK-NpA/hsol.SorCS1 encoding the human soluble SorCS1 cDNA (amino acids 1-1100) was digested with SalI and the 3363 by fragment encoding hsol.SorCS1 was inserted into an AAV8 plasmid (ViraQuest Inc, North Liberty, Iowa) generating AAV8/hsol.SorCS1. The plasmid pVQAd5CMVK-NpA/hsol.SorCS1 was sent to ViraQuest, that used this shuttle plasmid for subcloning, generation and propagation of adeno-associated virus over-expressing hsol.SorCS1. The virus AAV8/ntLacZ that over-express LacZ as a negative control was also purchased from ViraQuest.

[0344] The mice were i.v. injected with either soluble sorcs1 (AAV8-hsol.sorCS1) or LacZ (AAV8-LacZ) adeno-associated virus at the age of 8 weeks. The titer of virus injected was 1E11 vgc/mouse (vgc=viral genome copies). After 48 hours of quarantine, the animals were transferred back to their normal housing facilities and fed standard chow in the entire experimental period. Hereafter, the mice were weighed every fortnight in the following 22 weeks. The mice treated with AAV8-hsol.sorcs1 gain less weight in the period they are followed. The reduction in weight gain is 32% compared to their controls (LacZ treated animals). The gain in AAV8-hsol.sorcs1 group and the -LacZ group is 3.62±0.14 g and 5.32±0.50 g, respectively. Data are means±SEM. The effect of the AAV-hsol.sorcs1 virus, on weight gain, last up to 150 days post injection of the virus (p=0.0296, 2-way ANOVA, treatment). The results are displayed in FIG. 8.

### Example 14

### Method of Producing Long-Acting SorCS1

[0345] A long-acting SorCS1 agent may be produced by chemical conjugation of SorCS1 to human serum albumin or a variant of human serum albumin.

[0346] Chemical conjugation can be performed using a multitude of different reactions and linkers known in the art, including linkers with a high covalent stability and linkers with lower covalent stability having the potential of releasing the active component from the albumin molecule typically by hydrolysation of a labile chemical bond.

[0347] Especially suitable is coupling to the free cysteine residue on the albumin molecule (Cys 34), e.g. by methods described in WO2010092135, especially the methods using PDPH (3-(2-pyridyldithio) propionyl hydrazide) to link albumin to SorCS1 via a hydrazone link to SorCS1. In another aspect the method in WO2010092135 using EMCH ((3,3″-N-(ε-maleimidocaproic acid) hydrazide) to link albumin to SorCS1 via a hydrazone link to SorCS1 is used.

[0348] Suitable attachment groups on the SorCS1 molecule include reactions for coupling to the glycosylation moieties of the SorCS1 molecule. Coupling to the glycosylation moieties is preferred as these are expected not to have direct interaction with the SorCS1 receptor and thereby the coupling will not interfere with the function.

[0349] Yet another coupling technology is described by Neose (see eg US2004/0126838) using enzymatic glycoconjugation. This technology can be used to link e.g. albumin to SorCS1 using a suitable linker.

[0350] In the special case where chemical conjugation to the SorCS1 molecule strongly reduces the functional activity it will be preferable to use a labile linker that can release a functional SorCS1. It is preferable to attach only one albumin molecule per SorCS1 molecule.

[0351] In another instance the coupling of the SorCS1 and the albumin molecule can be performed by genetic fusion of the two molecules. Two different orientation possibilities exist:

### NH₂—Albumin-SorCS1-COOH

[0352] NH₂—SorCS1-albumin-COOH

[0353] Albumin or albumin variants can be produced as described in WO2010092135.

[0354] The SorCS1 and the albumin can be conjugated using the PDPH or EMCH chemistry as described in WO2010092135.

[0355] The biopotency of long-acting SorCS1 will be determined using established in vivo assays. Taking into account the bioavailability and kinectics of a long-acting SorCS1 compound, a way to measure the effect in mice would be to measure food intake (g/day/mouse), food preference tests, and changes in weight (weekly weighing of the mice), and weekly MRI scans (for fat and lean body mass).

[0356] Further the in vitro bioactivity of long-acting SorCS1 will be determined using standard cell assays. In cell cultures (e.g. 3T3, primary adipocytes or HEK293 cells) the long-acting SorCS1 will be added to the medium, and in lysates of the cells, we will determine expression of the a) insulin receptor, the b) phosphorylated insulin receptor (the activated form), and c) GLUT4 (facilitates glucose influx in cells), and d) the localization of GLUT4 (cell membrane or vesicular) in biotinylation studies. In adipocytes (3T3 or primary adipocytes) we will also measure proteins relevant for transition from white adipose tissue (WAT) to brown adipose tissue (BAT) after addition of long-lasting SorCS1. Relevant proteins to measure could be UCP1, PRDM16 and PGC-alpha.

[0357] For all assays the bioactivity of long-acting SorCS1 will be compared to recombinant SorCS1 by using The National Institute of Biological Standards and Controls (NIBSC Herts, UK) appropriate standards.

[0358] The amount of SorCS1 protein in a given composition will be determined using standard immunological techniques such as ELISA assay or RIA assay and characterized by Western blotting and measurement of total protein content using Bradford and/or Lowry assays.

### Example 15

### Covalent Attachment of PEG to SorCS1

[0359] SorCS1 and variants thereof may be covalently linked to any suitable polyethylene (PEG) molecule such as but not limited to SPA-PEG 5000, SPA-PEG 12000 and SPA-PEG 20000 (NOF Corporation) as described below (“PEGylation of SorCS1 in solution”).

### PEGylation of SorCS1 in Solution

[0360] Human SorCS1 are PEGylated at a concentration of 250 μg/ml in 50 mM sodium phosphate, 100 mM NaCl, pH 8.5. The molar surplus of PEG is 5-100 times with respect to PEGylation sites on the protein. The reaction mixture is placed in a thermo mixer for 30 minutes at 37° C. at 1200 rpm. After 30 minutes, quenching of the reaction is obtained by adding a molar excess of glycine.

[0361] Cation exchange chromatography is applied to remove excess PEG, glycine and other byproducts from the reaction mixture. The PEGylation reaction mixture is diluted with 20 mM sodium citrate pH 2.5 until the ionic strength is less than 7 mS/cm. pH is adjusted to 2.5 using 5 N HCl. The mixture is applied to a SP-sepharose FF column equilibrated with 30 mM sodium citrate pH 2.5. Unbound material is washed off the column using 4 column volumes of equilibration buffer. PEGylated protein is eluted in three column volumes by adding 20 mM sodium citrate, 750 mM sodium chloride. Pure PEGylated SorCS1 is concentrated and buffer exchange is performed using VivaSpin concentration devices, molecular weight cut-off (MWCO): 10 kDa.

### REFERENCES

[0362] 1. P. Zimmet et al. (2005) The metabolic syndrome: A global public health problem and a new definition. J. Arthero. Thromb. 12(6) pp. 295-300
[0363] 2. K. Srinivasan and P. Ramarao (2007) Animal models in type 2 diabetes research: An overview. Indian J. Med. Res. 125, pp 451-472
[0364] 3. L. Plum et al. (2004) Transgenic and knockout mice in diabetes research: Novel insights into pathophysiology, limitations, and perspectives. Physiology 20 pp. 152-61
[0365] 4. P. C. Champe and R. A. Harvey (2005) Diabetes Mellitus. Biochemistry 3rd Chapter 25
[0366] 5. M. A. Herman and B. B. Kahn (2006) Glucose transport and sensing in them maintenance of glucose homeostasis and metabolic harmony. J. Cli, Invest. 116 pp. 1767-75 Pharm. Res. 57 pp 6-18
[0367] 6. S. Koren and G. Fantus (2007) Inhibition of the protein tyrosine phosphatase PTP1B: potential therapy for obesity, insulin resistance and type-2 diabetes mellitus. Prac. Res. Clin. Endo. Meta. 21(4) pp 621-640
[0368] 7. J. C. Hou and J. E. Pessin (2007) Ins (endocytosis) and outs (exocytosis) of GLUT4 trafficking. Cur. Opin. Cell. Biol. 19 pp 466-473
[0369] 8. T. E. Graham and B. B. Kahn (2007) Tissue-specific alterations of glucose transport and molecular mechanisms of intertissue communication in obesity and type 2 diabetes. Horm. Metab. Res. 39 pp 717-721
[0370] 9. C. Guerra et al. (2001) Brown adipose tissue-specific insulin receptor knockout shows diabetic phenotype without insulin resistance. J. Clin. Invest. 108(8) pp 1205-1213
[0371] 10. G. Hermey et al. (1999) Identification and characterization of SorCS, a third member of a novel receptor family. Biochem. Biophys. Res. Commun. 266(2) pp. 347-51
[0372] 11. A. Nykjaer et al. (2004) Sortilin is essential for proNGF-induced neuronal death. Nature 427(6977) pp. 843-8
[0373] 12. O. M. Andersen et al. (2005) Neuronal sorting protein-related receptor SorLA/LR11 regulates processing of the amyloid precursor protein. Proc. Natl. Acad. Sci. USA. 102(38) pp. 13461-13466
[0374] 13. N. J. Morris et al. (1998) Sortilin is the major 110-kDa protein in GLUT4 vesicles from adipocytes. J. Biol. Chem. 273(6) pp. 3582-7
[0375] 14. J. Shi and V. Kandror (2005) Sortilin is essential and sufficient for the formation of Glut4 storage vesicles in 3T3-L1 adipocytes. Dev. Cell 9 pp 99-108
[0376] 15. G. Hermey and H. C. Schaller (2000) Alternative splicing of murine SorCS leads to two forms of the receptor that differ completely in their cytoplasmic tails. Biochim. Biophys. Acta. 1491(1-3) pp. 350-54
[0377] 16. G. Hermey et al. (2003) Characterization of SorCS1, an alternatively spliced receptor with completely different cytoplasmic domains that mediate different trafficking in cells. J. Biol. Chem. 278 pp. 7390-96
[0378] 17. M. S. Nielsen et al. (2008) Different motifs regulate trafficking of SorCS1 isoforms. Traffic 9 pp. 980-94
[0379] 18. S. M. Clee et al. (2006) Positional of SorCS1, a type 2 diabetes quantitative trait locus. Nature genetics 6 pp. 688-93
[0380] 19. M. O. Goodarzi et al. (2007) SorCS1: A novel human type 2 diabetes susceptibility gene suggested by the mouse. Diabetes 56(7) pp. 1922-9
[0381] 20. WO 2004/022719 (Attie et al.)

### OVERVIEW OF SEQUENCES

[0382] SEQ ID NO 1: Homo sapiens preproSorCS1 b (Isoform 1)
SEQ ID NO 2: Homo sapiens preproSorCS1 (Isoform 2)
SEQ ID NO 3: Homo sapiens preproSorCS1c (Isoform 3)
SEQ ID NO 4: Homo sapiens preproSorCS1a (Isoform 4)
SEQ ID NO 5: Soluble Homo sapiens preproSorCS1
SEQ ID NO 6: Homo sapiens proSorCS1b (Isoform 1)
SEQ ID NO 7: Homo sapiens proSorCS1 (Isoform 2)
SEQ ID NO 8: Homo sapiens proSorCS1c (Isoform 3)
SEQ ID NO 9: Homo sapiens proSorCS1a (Isoform 4)
SEQ ID NO 10: Soluble Homo sapiens proSorCS1
SEQ ID NO 11: Homo sapiens mature SorCS1b (Isoform 1)
SEQ ID NO 12: Homo sapiens mature SorCS1 (Isoform 2)
SEQ ID NO 13: Homo sapiens mature SorCS1c (Isoform 3)
SEQ ID NO 14: Homo sapiens mature SorCS1a (Isoform 4)
SEQ ID NO 15: Soluble Homo sapiens mature SorCS1
SEQ ID NO 16: Mouse preproSorCS1b (isoform 1)
SEQ ID NO 17: Mouse preproSorCS1a (isoform 2)
SEQ ID NO 18: Mouse preproSorCS1c (isoform 3)
SEQ ID NO 19: Mouse preproSorCS1c+ (isoform 4)
SEQ ID NO 20: Mouse preproSorCS1d
SEQ ID NO 21: Soluble mouse preproSorCS1
SEQ ID NO 22: Mouse proSorCS1 b (isoform 1)
SEQ ID NO 23: Mouse proSorCS1a (isoform 2)
SEQ ID NO 24: Mouse proSorCS1c (isoform 3)
SEQ ID NO 25: Mouse proSorCS1c+ (isoform 4)
SEQ ID NO 26: Mouse proSorCS1d
SEQ ID NO 27: Soluble mouse proSorCS1
SEQ ID NO 28: Mouse mature SorCS1b (isoform 1)
SEQ ID NO 29: Mouse mature SorCS1a (isoform 2)
SEQ ID NO 30: Mouse mature SorCS1c (isoform 3)
SEQ ID NO 31: Mouse mature SorCS1c+ (isoform 4)
SEQ ID NO 32: Mouse mature SorCS1d
SEQ ID NO 33: Soluble mouse mature SorCS1
SEQ ID NO 34: Chimpanzee preproSorCS1
SEQ ID NO 35: Chimpanzee proSorCS1
SEQ ID NO 36: Chimpanzee mature SorCS1
SEQ ID NO 37: Chimpanzee soluble SorCS1
SEQ ID NO 38: Dog mature SorCS1
SEQ ID NO 39: Dog soluble SorCS1
SEQ ID NO 40: Cow preproSorCS1
SEQ ID NO 41: Cow proSorCS1
SEQ ID NO 42: Cow mature SorCS1
SEQ ID NO 43: Cow soluble SorCS1
SEQ ID NO 44: Rat preproSorSC1
SEQ ID NO 45: Rat proSorCS1
SEQ ID NO 46: Rat mature SorCS1
SEQ ID NO 47: Rat soluble SorCS1
SEQ ID NO 48: Chicken preproSorCS1
SEQ ID NO 49: Chicken proSorCS1
SEQ ID NO 50: Chicken mature SorCS1
SEQ ID NO 51: Chicken soluble SorCS1
SEQ ID NO 52: Homo sapiens preproSortilin
SEQ ID NO 53: Homo sapiens preproSorLA
SEQ ID NO 54: Homo sapiens preproSorCS2
SEQ ID NO 55: Homo sapiens preproSorCS3
SEQ ID NO 56: Homo sapiens proSorCS3
SEQ ID NO 57: Homo sapiens mature SorCS3
SEQ ID NO 58: Homo sapiens soluble preproSorCS3
SEQ ID NO 59: Homo sapiens soluble proSorCS3
SEQ ID NO 60: Homo sapiens soluble mature SorCS3
SEQ ID NO 61: Homo Sapiens proSorCS1B variant
SEQ ID NO 62: Homo Sapiens soluble proSorCS1B variant
SEQ ID NO 63: Homo Sapiens mature SorCS1B variant
SEQ ID NO 64: Homo Sapiens soluble mature SorCS1B variant

### SEQ ID NO 65: Linker—SGGSGGS

### SEQ ID NO 66: Linker—GGSGGSGGSGGSGGG

### SEQ ID NO 67: Linker—GGSGGSGGSGGSGGSGGS

### SEQ ID NO 68: Linker—GGGGSGGGGSGGGGS

[0383] SEQ ID NO 69: Linker—EFAGAAAV

The application's sequence listing, which the Patent Office published only in electronic form, follows.

SEQUENCE LISTING (69 sequences)

SEQ ID NO: 1 - protein, 1168 aa, Homo sapiens
  MISC_FEATURE (1)..(1168): preproSorCS1b, Isoform 1
MGKVGAGGGSQARLSALLAGAGLLILCAPGVCGGGSCCPSPHPSSAPRSASTPRGFSHQGRPGRAPATPLPLVVRPLFSVAPGDRALSLERARGTGASMAVAARSGRRRRSGADQEKAERGEGASRSPRGVLRDGGQQEPGTRERDPDKATRFRMEELRLTSTTFALTGDSAHNQAMVHWSGHNSSVILILTKLYDYNLGSITESSLWRSTDYGTTYEKLNDKVGLKTILSYLYVCPTNKRKIMLLTDPEIESSLLISSDEGATYQKYRLNFYIQSLLFHPKQEDWILAYSQDQKLYSSAEFGRRWQLIQEGVVPNRFYWSVMGSNKEPDLVHLEARTVDGHSHYLTCRMQNCTEANRNQPFPGYIDPDSLIVQDHYVFVQLTSGGRPHYYVSYRRNAFAQMKLPKYALPKDMHVISTDENQVFAAVQEWNQNDTYNLYISDTRGVYFTLALENVQSSRGPEGNIMIDLYEVAGIKGMFLANKKIDNQVKTFITYNKGRDWRLLQAPDTDLRGDPVHCLLPYCSLHLHLKVSENPYTSGIIASKDTAPSIIVASGNIGSELSDTDISMFVSSDAGNTWRQIFEEEHSVLYLDQGGVLVAMKHTSLPIRHLWLSFDEGRSWSKYSFTSIPLFVDGVLGEPGEETLIMTVFGHFSHRSEWQLVKVDYKSIFDRRCAEEDYRPWQLHSQGEACIMGAKRIYKKRKSERKCMQGKYAGAMESEPCVCTEADFDCDYGYERHSNGQCLPAFWFNPSSLSKDCSLGQSYLNSTGYRKVVSNNCTDGVREQYTAKPQKCPGKAPRGLRIVTADGKLTAEQGHNVTLMVQLEEGDVQRTLIQVDFGDGIAVSYVNLSSMEDGIKHVYQNVGIFRVTVQVDNSLGSDSAVLYLHVTCPLEHVHLSLPFVTTKNKEVNATAVLWPSQVGTLTYVWWYGNNTEPLITLEGSISFRFTSEGMNTITVQVSAGNAILQDTKTIAVYEEFRSLRLSFSPNLDDYNPDIPEWRRDIGRVIKKSLVEATGVPGQHILVAVLPGLPTTAELFVLPYQDPAGENKRSTDDLEQISELLIHTLNQNSVHFELKPGVRVLVHAAHLTAAPLVDLTPTHSGSAMLMLLSVVFVGLAVFVIYKFKRRVALPSPPSPSTQPGDSSLRLQRARHATPPSTPKRGSAGAQYAI

SEQ ID NO: 2 - protein, 1197 aa, Homo sapiens
  MISC_FEATURE (1)..(1197): preproSorCS1, Isoform 2
MGKVGAGGGSQARLSALLAGAGLLILCAPGVCGGGSCCPSPHPSSAPRSASTPRGFSHQGRPGRAPATPLPLVVRPLFSVAPGDRALSLERARGTGASMAVAARSGRRRRSGADQEKAERGEGASRSPRGVLRDGGQQEPGTRERDPDKATRFRMEELRLTSTTFALTGDSAHNQAMVHWSGHNSSVILILTKLYDYNLGSITESSLWRSTDYGTTYEKLNDKVGLKTILSYLYVCPTNKRKIMLLTDPEIESSLLISSDEGATYQKYRLNFYIQSLLFHPKQEDWILAYSQDQKLYSSAEFGRRWQLIQEGVVPNRFYWSVMGSNKEPDLVHLEARTVDGHSHYLTCRMQNCTEANRQPFPGYIDPDSLIVQDHYVFVQLTSGGRPHYYVSYRRNAFAQMKLPKYALPKDMHVISTDENQVFAAVQEWNQNDTYNLYISDTRGVYFTLALENVQSSRGPEGNIMIDLYEVAGIKGMFLANKKIDNQVKTFITYNKGRDWRLLQAPDTDLRGDPVHCLLPYCSLHLHLKVSENPYTSGIIASKDTAPSIIVASGNIGSELSDTDISMFVSSDAGNTWRQIFEEEHSVLYLDQGGVLVAMKHTSLPIRHLWLSFDEGRSWSKYSFTSIPLFVDGVLGEPGEETLIMTVFGHFSHRSEWQLVKVDYKSIFDRRCAEEDYRPWQLHSQGEACIMGAKRIYKKRKSERKCMQGKYAGAMESEPCVCTEADFDCDYGYERHSNGQCLPAFWFNPSSLSKDCSLGQSYLNSTGYRKVVSNNCTDGVREQYTAKPQKCPGKAPRGLRIVTADGKLTAEQGHNVTLMVQLEEGDVQRTLIQVDFGDGIAVSYVNLSSMEDGIKHVYQNVGIFRVTVQVDNSLGSDSAVLYLHVTCPLEHVHLSLPFVTTKNKEVNATAVLWPSQVGTLTYVWWYGNNTEPLITLEGSISFRFTSEGMNTITVQVSAGNAILQDTKTIAVYEEFRSLRLSFSPNLDDYNPDIPEWRRDIGRVIKKSLVEATGVPGQHILVAVLPGLPTTAELFVLPYQDPAGENKRSTDDLEQISELLIHTLNQNSVHFELKPGVRVLVHAAHLTAAPLVDLTPTHSGSAMLMLLSVVFVGLAVFVIYKFKRKIPGINVYAQMQNEKEQEMISPVSHSESRPNVPQTELRRPGQLIDEKVESQLIGSISIVAENQSTKEIPTYVNV

SEQ ID NO: 3 - protein, 1179 aa, Homo sapiens
  MISC_FEATURE (1)..(1179): preproSorCS1c, Isoform 3
MGKVGAGGGSQARLSALLAGAGLLILCAPGVCGGGSCCPSPHPSSAPRSASTPRGFSHQGRPGRAPATPLPLVVRPLFSVAPGDRALSLERARGTGASMAVAARSGRRRRSGADQEKAERGEGASRSPRGVLRDGGQQEPGTRERDPDKATRFRMEELRLTSTTFALTGDSAHNQAMVHWSGHNSSVILILTKLYDYNLGSITESSLWRSTDYGTTYEKLNDKVGLKTILSYLYVCPTNKRKIMLLTDPEIESSLLISSDEGATYQKYRLNFYIQSLLFHPKQEDWILAYSQDQKLYSSAEFGRRWQLIQEGVVPNRFYWSVMGSNKEPDLVHLEARTVDGHSHYLTCRMQNCTEANRNQPFPGYIDPDSLIVQDHYVFVQLTSGGRPHYYVSYRRNAFAQMKLPKYALPKDMHVISTDENQVFAAVQEWNQNDTYNLYISDTRGVYFTLALENVQSSRGPEGNIMIDLYEVAGIKGMFLANKKIDNQVKTFITYNKGRDWRLLQAPDTDLRGDPVHCLLPYCSLHLHLKVSENPYTSGIIASKDTAPSIIVASGNIGSELSDTDISMFVSSDAGNTWRQIFEEEHSVLYLDQGGVLVAMKHTSLPIRHLWLSFDEGRSWSKYSFTSIPLFVDGVLGEPGEETLIMTVFGHFSHRSEWQLVKVDYKSIFDRRCAEEDYRPWQLHSQGEACIMGAKRIYKKRKSERKCMQGKYAGAMESEPCVCTEADFDCDYGYERHSNGQCLPAFWFNPSSLSKDCSLGQSYLNSTGYRKVVSNNCTDGVREQYTAKPQKCPGKAPRGLRIVTADGKLTAEQGHNVTLMVQLEEGDVQRTLIQVDFGDGIAVSYVNLSSMEDGIKHVYQNVGIFRVTVQVDNSLGSDSAVLYLHVTCPLEHVHLSLPFVTTKNKEVNATAVLWPSQVGTLTYVWWYGNNTEPLITLEGSISFRFTSEGMNTITVQVSAGNAILQDTKTIAVYEEFRSLRLSFSPNLDDYNPDIPEWRRDIGRVIKKSLVEATGVPGQHILVAVLPGLPTTAELFVLPYQDPAGENKRSTDDLEQISELLIHTLNQNSVHFELKPGVRVLVHAAHLTAAPLVDLTPTHSGSAMLMLLSVVFVGLAVFVIYKFKRKIPGINVYAQMQNEKEQEMISPVSHSESRPNVPQTELRRPGQLIDEKVESQLIGK

SEQ ID NO: 4 - protein, 1159 aa, Homo sapiens
  MISC_FEATURE (1)..(1159): preproSorCS1a, Isoform 4
MGKVGAGGGSQARLSALLAGAGLLILCAPGVCGGGSCCPSPHPSSAPRSASTPRGFSHQGRPGRAPATPLPLVVRPLFSVAPGDRALSLERARGTGASMAVAARSGRRRRSGADQEKAERGEGASRSPRGVLRDGGQQEPGTRERDPDKATRFRMEELRLTSTTFALTGDSAHNQAMVHWSGHNSSVILILTKLYDYNLGSITESSLWRSTDYGTTYEKLNDKVGLKTILSYLYVCPTNKRKIMLLTDPEIESSLLISSDEGATYQKYRLNFYIQSLLFHPKQEDWILAYSQDQKLYSSAEFGRRWQLIQEGVVPNRFYWSVMGSNKEPDLVHLEARTVDGHSHYLTCRMQNCTEANRNQPFPGYIDPDSLIVQDHYVFVQLTSGGRPHYYVSYRRNAFAQMKLPKYALPKDMHVISTDENQVFAAVQEWNQNDTYNLYISDTRGVYFTLALENVQSSRGPEGNIMIDLYEVAGIKGMFLANKKIDNQVKTFITYNKGRDWRLLQAPDTDLRGDPVHCLLPYCSLHLHLKVSENPYTSGIIASKDTAPSIIVASGNIGSELSDTDISMFVSSDAGNTWRQIFEEEHSVLYLDQGGVLVAMKHTSLPIRHLWLSFDEGRSWSKYSFTSIPLFVDGVLGEPGEETLIMTVFGHFSHRSEWQLVKVDYKSIFDRRCAEEDYRPWQLHSQGEACIMGAKRIYKKRKSERKCMQGKYAGAMESEPCVCTEADFDCDYGYERHSNGQCLPAFWFNPSSLSKDCSLGQSYLNSTGYRKVVSNNCTDGVREQYTAKPQKCPGKAPRGLRIVTADGKLTAEQGHNVTLMVQLEEGDVQRTLIQVDFGDGIAVSYVNLSSMEDGIKHVYQNVGIFRVTVQVDNSLGSDSAVLYLHVTCPLEHVHLSLPFVTTKNKEVNATAVLWPSQVGTLTYVWWYGNNTEPLITLEGSISFRFTSEGMNTITVQVSAGNAILQDTKTIAVYEEFRSLRLSFSPNLDDYNPDIPEWRRDIGRVIKKSLVEATGVPGQHILVAVLPGLPTTAELFVLPYQDPAGENKRSTDDLEQISELLIHTLNQNSVHFELKPGVRVLVHAAHLTAAPLVDLTPTHSGSAMLMLLSVVFVGLAVFVIYKFKRCVSLYPRSPTPDLFLLPDRFRSMCYSDVHSSDGFY

SEQ ID NO: 5 - protein, 1100 aa, Homo sapiens
  MISC_FEATURE (1)..(1100): Soluble preproSorCS1
MGKVGAGGGSQARLSALLAGAGLLILCAPGVCGGGSCCPSPHPSSAPRSASTPRGFSHQGRPGRAPATPLPLVVRPLFSVAPGDRALSLERARGTGASMAVAARSGRRRRSGADQEKAERGEGASRSPRGVLRDGGQQEPGTRERDPDKATRFRMEELRLTSTTFALTGDSAHNQAMVHWSGHNSSVILILTKLYDYNLGSITESSLWRSTDYGTTYEKLNDKVGLKTILSYLYVCPTNKRKIMLLTDPEIESSLLISSDEGATYQKYRLNFYIQSLLFHPKQEDWILAYSQDQKLYSSAEFGRRWQLIQEGVVPNRFYWSVMGSNKEPDLVHLEARTVDGHSHYLTCRMQNCTEANRNQPFPGYIDPDSLIVQDHYVFVQLTSGGRPHYYVSYRRNAFAQMKLPKYALPKDMHVISTDENQVFAAVQEWNQNDTYNLYISDTRGVYFTLALENVQSSRGPEGNIMIDLYEVAGIKGMFLANKKIDNQVKTFITYNKGRDWRLLQAPDTDLRGDPVHCLLPYCSLHLHLKVSENPYTSGIIASKDTAPSIIVASGNIGSELSDTDISMFVSSDAGNTWRQIFEEEHSVLYLDQGGVLVAMKHTSLPIRHLWLSFDEGRSWSKYSFTSIPLFVDGVLGEPGEETLIMTVFGHFSHRSEWQLVKVDYKSIFDRRCAEEDYRPWQLHSQGEACIMGAKRIYKKRKSERKCMQGKYAGAMESEPCVCTEADFDCDYGYERHSNGQCLPAFWFNPSSLSKDCSLGQSYLNSTGYRKVVSNNCTDGVREQYTAKPQKCPGKAPRGLRIVTADGKLTAEQGHNVTLMVQLEEGDVQRTLIQVDFGDGIAVSYVNLSSMEDGIKHVYQNVGIFRVTVQVDNSLGSDSAVLYLHVTCPLEHVHLSLPFVTTKNKEVNATAVLWPSQVGTLTYVWWYGNNTEPLITLEGSISFRFTSEGMNTITVQVSAGNAILQDTKTIAVYEEFRSLRLSFSPNLDDYNPDIPEWRRDIGRVIKKSLVEATGVPGQHILVAVLPGLPTTAELFVLPYQDPAGENKRSTDDLEQISELLIHTLNQNSVHFELKPGVRVLVHAAHLTAAPLVDLTPTHSG

SEQ ID NO: 6 - protein, 1134 aa, Homo sapiens
  MISC_FEATURE (1)..(1134): proSorCS1b, Isoform 1
GGSCCPSPHPSSAPRSASTPRGFSHQGRPGRAPATPLPLVVRPLFSVAPGDRALSLERARGTGASMAVAARSGRRRRSGADQEKAERGEGASRSPRGVLRDGGQQEPGTRERDPDKATRFRMEELRLTSTTFALTGDSAHNQAMVHWSGHNSSVILILTKLYDYNLGSITESSLWRSTDYGTTYEKLNDKVGLKTILSYLYVCPTNKRKIMLLTDPEIESSLLISSDEGATYQKYRLNFYIQSLLFHPKQEDWILAYSQDQKLYSSAEFGRRWQLIQEGVVPNRFYWSVMGSNKEPDLVHLEARTVDGHSHYLTCRMQNCTEANRNQPFPGYIDPDSLIVQDHYVFVQLTSGGRPHYYVSYRRNAFAQMKLPKYALPKDMHVISTDENQVFAAVQEWNQNDTYNLYISDTRGVYFTLALENVQSSRGPEGNIMIDLYEVAGIKGMFLANKKIDNQVKTFITYNKGRDWRLLQAPDTDLRGDPVHCLLPYCSLHLHLKVSENPYTSGIIASKDTAPSIIVASGNIGSELSDTDISMFVSSDAGNTWRQIFEEEHSVLYLDQGGVLVAMKHTSLPIRHLWLSFDEGRSWSKYSFTSIPLFVDGVLGEPGEETLIMTVFGHFSHRSEWQLVKVDYKSIFDRRCAEEDYRPWQLHSQGEACIMGAKRIYKKRKSERKCMQGKYAGAMESEPCVCTEADFDCDYGYERHSNGQCLPAFWFNPSSLSKDCSLGQSYLNSTGYRKVVSNNCTDGVREQYTAKPQKCPGKAPRGLRIVTADGKLTAEQGHNVTLMVQLEEGDVQRTLIQVDFGDGIAVSYVNLSSMEDGIKHVYQNVGIFRVTVQVDNSLGSDSAVLYLHVTCPLEHVHLSLPFVTTKNKEVNATAVLWPSQVGTLTYVWWYGNNTEPLITLEGSISFRFTSEGMNTITVQVSAGNAILQDTKTIAVYEEFRSLRLSFSPNLDDYNPDIPEWRRDIGRVIKKSLVEATGVPGQHILVAVLPGPTTAELFVLPYQDPAGENKRSTDDLEQISELLIHTLNQNSVHFELKPGVRVLVHAAHLTAAPLVDLTPTHSGSAMLMLLSVVFVGLAVFVIYKFKRRVALPSPPSPSTQPGDSSLRLQRARHATPPSTPKRGSAGAQYAI

SEQ ID NO: 7 - protein, 1164 aa, Homo sapiens
  MISC_FEATURE (1)..(1164): proSorCS1, Isoform 2
GGSCCPSPHPSSAPRSASTPRGFSHQGRPGRAPATPLPLVVRPLFSVAPGDRALSLERARGTGASMAVAARSGRRRRSGADQEKAERGEGASRSPRGVLRDGGQQEPGTRERDPDKATRFRMEELRLTSTTFALTGDSAHNQAMVHWSGHNSSVILILTKLYDYNLGSITESSLWRSTDYGTTYEKLNDKVGLKTILSYLYVCPTNKRKIMLLTDPEIESSLLISSDEGATYQKYRLNFYIQSLLFHPKQEDWILAYSQDQKLYSSAEFGRRWQLIQEGVVPNRFYWSVMGSNKEPDLVHLEARTVDGHSHYLTCRMQNCTEANRQPFPGYIDPDSLIVQDHYVFVQLTSGGRPHYYVSYRRNAFAQMKLPKYALPKDMHVISTDENQVFAAVQEWNQNDTYNLYISDTRGVYFTLALENVQSSRGPEGNIMIDLYEVAGIKGMFLANKKIDNQVKTFITYNKGRDWRLLQAPDTDLRGDPVHCLLPYCSLHLHLKVSENPYTSGIIASKDTAPSIIVASGNIGSELSDTDISMFVSSDAGNTWRQIFEEEHSVLYLDQGGVLVAMKHTSLPIRHLWLSFDEGRSWSKYSFTSIPLFVDGVLGEPGEETLIMTVFGHFSHRSEWQLVKVDYKSIFDRRCAEEDYRPWQLHSQGEACIMGAKRIYKKRKSERKCMQGKYAGAMESEPCVCTEADFDCDYGYERHSNGQCLPAFWFNPSSLSKDCSLGQSYLNSTGYRKVVSNNCTDGVREQYTAKPQKCPGKAPRGLRIVTADGKLTAEQGHNVTLMVQLEEGDVQRTLIQVDFGDGIAVSYVNLSSMEDGIKHVYQNVGIFRVTVQVDNSLGSDSAVLYLHVTCPLEHVHLSLPFVTTKNKEVNATAVLWPSQVGTLTYVWWYGNNTEPLITLEGSISFRFTSEGMNTITVQVSAGNAILQDTKTIAVYEEFRSLRLSFSPNLDDYNPDIPEWRRDIGRVIKKSLVEATGVPGQHILVAVLPGLPTTAELFVLPYQDPAGENKRSTDDLEQISELLIHTLNQNSVHFELKPGVRVLVHAAHLTAAPLVDLTPTHSGSAMLMLLSVVFVGLAVFVIYKFKRKIPGINVYAQMQNEKEQEMISPVSHSESRPNVPQTELRRPGQLIDEKVESQLIGSISIVAENQSTKEIPTYVNV

SEQ ID NO: 8 - protein, 1146 aa, Homo sapiens
  MISC_FEATURE (1)..(1146): proSorCS1c, Isoform 3
GGSCCPSPHPSSAPRSASTPRGFSHQGRPGRAPATPLPLVVRPLFSVAPGDRALSLERARGTGASMAVAARSGRRRRSGADQEKAERGEGASRSPRGVLRDGGQQEPGTRERDPDKATRFRMEELRLTSTTFALTGDSAHNQAMVHWSGHNSSVILILTKLYDYNLGSITESSLWRSTDYGTTYEKLNDKVGLKTILSYLYVCPTNKRKIMLLTDPEIESSLLISSDEGATYQKYRLNFYIQSLLFHPKQEDWILAYSQDQKLYSSAEFGRRWQLIQEGVVPNRFYWSVMGSNKEPDLVHLEARTVDGHSHYLTCRMQNCTEANRNQPFPGYIDPDSLIVQDHYVFVQLTSGGRPHYYVSYRRNAFAQMKLPKYALPKDMHVISTDENQVFAAVQEWNQNDTYNLYISDTRGVYFTLALENVQSSRGPEGNIMIDLYEVAGIKGMFLANKKIDNQVKTFITYNKGRDWRLLQAPDTDLRGDPVHCLLPYCSLHLHLKVSENPYTSGIIASKDTAPSIIVASGNIGSELSDTDISMFVSSDAGNTWRQIFEEEHSVLYLDQGGVLVAMKHTSLPIRHLWLSFDEGRSWSKYSFTSIPLFVDGVLGEPGEETLIMTVFGHFSHRSEWQLVKVDYKSIFDRRCAEEDYRPWQLHSQGEACIMGAKRIYKKRKSERKCMQGKYAGAMESEPCVCTEADFDCDYGYERHSNGQCLPAFWFNPSSLSKDCSLGQSYLNSTGYRKVVSNNCTDGVREQYTAKPQKCPGKAPRGLRIVTADGKLTAEQGHNVTLMVQLEEGDVQRTLIQVDFGDGIAVSYVNLSSMEDGIKHVYQNVGIFRVTVQVDNSLGSDSAVLYLHVTCPLEHVHLSLPFVTTKNKEVNATAVLWPSQVGTLTYVWWYGNNTEPLITLEGSISFRFTSEGMNTITVQVSAGNAILQDTKTIAVYEEFRSLRLSFSPNLDDYNPDIPEWRRDIGRVIKKSLVEATGVPGQHILVAVLPGLPTTAELFVLPYQDPAGENKRSTDDLEQISELLIHTLNQNSVHFELKPGVRVLVHAAHLTAAPLVDLTPTHSGSAMLMLLSVVFVGLAVFVIYKFKRKIPGINVYAQMQNEKEQEMISPVSHSESRPNVPQTELRRPGQLIDEKVESQLIGK

SEQ ID NO: 9 - protein, 1125 aa, Homo sapiens
  MISC_FEATURE (1)..(1125): proSorCS1a, Isoform 4
GGSCCPSPHPSSAPRSASTPRGFSHQGRPGRAPATPLPLVVRPLFSVAPGDRALSLERARGTGASMAVAARSGRRRRSGADQEKAERGEGASRSPRGVLRDGGQQEPGTRERDPDKATRFRMEELRLTSTTFALTGDSAHNQAMVHWSGHNSSVILILTKLYDYNLGSITESSLWRSTDYGTTYEKLNDKVGLKTILSYLYVCPTNKRKIMLLTDPEIESSLLISSDEGATYQKYRLNFYIQSLLFHPKQEDWILAYSQDQKLYSSAEFGRRWQLIQEGVVPNRFYWSVMGSNKEPDLVHLEARTVDGHSHYLTCRMQNCTEANRNQPFPGYIDPDSLIVQDHYVFVQLTSGGRPHYYVSYRRNAFAQMKLPKYALPKDMHVISTDENQVFAAVQEWNQNDTYNLYISDTRGVYFTLALENVQSSRGPEGNIMIDLYEVAGIKGMFLANKKIDNQVKTFITYNKGRDWRLLQAPDTDLRGDPVHCLLPYCSLHLHLKVSENPYTSGIASKDTAPSIIVASGNIGSELSDTDISMFVSSDAGNTWRQIFEEEHSVLYLDQGGVLVAMKHTSLPIRHLWLSFDEGRSWSKYSFTSIPLFVDGVLGEPGEETLIMTVFGHFSHRSEWQLVKVDYKSIFDRRCAEEDYRPWQLHSQGEACIMGAKRIYKKRKSERKCMQGKYAGAMESEPCVCTEADFDCDYGYERHSNGQCLPAFWFNPSSLSKDCSLGQSYLNSTGYRKVVSNNCTDGVREQYTAKPQKCPGKAPRGLRIVTADGKLTAEQGHNVTLMVQLEEGDVQRTLIQVDFGDGIAVSYVNLSSMEDGIKHVYQNVGIFRVTVQVDNSLGSDSAVLYLHVTCPLEHVHLSLPFVTTKNKEVNATAVLWPSQVGTLTYVWWYGNNTEPLITLEGSISFRFTSEGMNTITVQVSAGNAILQDTKTIAVYEEFRSLRLSFSPNLDDYNPDIPEWRRDIGRVIKKSLVEATGVPGQHILVAVLPGLPTTAELFVLPYQDPAGENKRSTDDLEQISELLIHTLNQNSVHFELKPGVRVLVHAAHLTAAPLVDLTPTHSGSAMLMLLSVVFVGLAVFVIYKFKRCVSLYPRSPTPDLFLLPDRFRSMCYSDVHSSDGFY

SEQ ID NO: 10 - protein, 1046 aa, Homo sapiens
  MISC_FEATURE (1)..(1046): Soluble proSorCS1
GFSHQGRPGRAPATPLPLVVRPLFSVAPGDRALSLERARGTGASMAVAARSGRRRRSGADQEKAERGEGASRSPRGVLRDGGQQEPGTRERDPDKATRFRMEELRLTSTTFALTGDSAHNQAMVHWSGHNSSVILILTKLYDYNLGSITESSLWRSTDYGTTYEKLNDKVGLKTILSYLYVCPTNKRKIMLLTDPEIESSLLISSDEGATYQKYRLNFYIQSLLFHPKQEDWILAYSQDQKLYSSAEFGRRWQLIQEGVVPNRFYWSVMGSNKEPDLVHLEARTVDGHSHYLTCRMQNCTEANRNQPFPGYIDPDSLIVQDHYVFVQLTSGGRPHYYVSYRRNAFAQMKLPKYALPKDMHVISTDENQVFAAVQEWNQNDTYNLYISDTRGVYFTLALENVQSSRGPEGNIMIDLYEVAGIKGMFLANKKIDNQVKTFITYNKGRDWRLLQAPDTDLRGDPVHCLLPYCSLHLHLKVSENPYTSGIIASKDTAPSIIVASGNIGSELSDTDISMFVSSDAGNTWRQIFEEEHSVLYLDQGGVLVAMKHTSLPIRHLWLSFDEGRSWSKYSFTSIPLFVDGVLGEPGEETLIMTVFGHFSHRSEWQLVKVDYKSIFDRRCAEEDYRPWQLHSQGEACIMGAKRIYKKRKSERKCMQGKYAGAMESEPCVCTEADFDCDYGYERHSNGQCLPAFWFNPSSLSKDCSLGQSYLNSTGYRKVVSNNCTDGVREQYTAKPQKCPGKAPRGLRIVTADGKLTAEQGHNVTLMVQLEEGDVQRTLIQVDFGDGIAVSYVNLSSMEDGIKHVYQNVGIFRVTVQVDNSLGSDSAVLYLHVTCPLEHVHLSLPFVTTKNKEVNATAVLWPSQVGTLTYVWWYGNNTEPLITLEGSISFRFTSEGMNTITVQVSAGNAILQDTKTIAVYEEFRSLRLSFSPNLDDYNPDIPEWRRDIGRVIKKSLVEATGVPGQHILVAVLPGLPTTAELFVLPYQDPAGENKRSTDDLEQISELLIHTLNQNSVHFELKPGVRVLVHAAHLTAAPLVDLTPTHSG

SEQ ID NO: 11 - protein, 1058 aa, Homo sapiens
  MISC_FEATURE (1)..(1058): Mature SorCS1b, Isoform 1
SGADQEKAERGEGASRSPRGVLRDGGQQEPGTRERDPDKATRFRMEELRLTSTTFALTGDSAHNQAMVHWSGHNSSVILILTKLYDYNLGSITESSLWRSTDYGTTYEKLNDKVGLKTILSYLYVCPTNKRKIMLLTDPEIESSLLISSDEGATYQKYRLNFYIQSLLFHPKQEDWILAYSQDQKLYSSAEFGRRWQLIQEGVVPNRFYWSVMGSNKEPDLVHLEARTVDGHSHYLTCRMQNCTEANRNQPFPGYIDPDSLIVQDHYVFVQLTSGGRPHYYVSYRRNAFAQMKLPKYALPKDMHVISTDENQVFAAVQEWNQNDTYNLYISDTRGVYFTLALENVQSSRGPEGNIMIDLYEVAGIKGMFLANKKIDNQVKTFITYNKGRDWRLLQAPDTDLRGDPVHCLLPYCSLHLHLKVSENPYTSGIIASKDTAPSIIVASGNIGSELSDTDISMFVSSDAGNTWRQIFEEEHSVLYLDQGGVLVAMKHTSLPIRHLWLSFDEGRSWSKYSFTSIPLFVDGVLGEPGEETLIMTVFGHFSHRSEWQLVKVDYKSIFDRRCAEEDYRPWQLHSQGEACIMGAKRIYKKRKSERKCMQGKYAGAMESEPCVCTEADFDCDYGYERHSNGQCLPAFWFNPSSLSKDCSLGQSYLNSTGYRKVVSNNCTDGVREQYTAKPQKCPGKAPRGLRIVTADGKLTAEQGHNVTLMVQLEEGDVQRTLIQVDFGDGIAVSYVNLSSMEDGIKHVYQNVGIFRVTVQVDNSLGSDSAVLYLHVTCPLEHVHLSLPFVTTKNKEVNATAVLWPSQVGTLTYVWWYGNNTEPLITLEGSISFRFTSEGMNTITVQVSAGNAILQDTKTIAVYEEFRSLRLSFSPNLDDYNPDIPEWRRDIGRVIKKSLVEATGVPGQHILVAVLPGLPTTAELFVLPYQDPAGENKRSTDDLEQISELLIHTLNQNSVHFELKPGVRVLVHAAHLTAAPLVDLTPTHSGSAMLMLLSVVFVGLAVFVIYKFKRRVALPSPPSPSTQPGDSSLRLQRARHATPPSTPKRGSAGAQYAI

SEQ ID NO: 12 - protein, 1087 aa, Homo sapiens
  MISC_FEATURE (1)..(1087): Mature SorCS1, Isoform 2
SGADQEKAERGEGASRSPRGVLRDGGQQEPGTRERDPDKATRFRMEELRLTSTTFALTGDSAHNQAMVHWSGHNSSVILILTKLYDYNLGSITESSLWRSTDYGTTYEKLNDKVGLKTILSYLYVCPTNKRKIMLLTDPEIESSLLISSDEGATYQKYRLNFYIQSLLFHPKQEDWILAYSQDQKLYSSAEFGRRWQLIQEGVVPNRFYWSVMGSNKEPDLVHLEARTVDGHSHYLTCRMQNCTEANRQPFPGYIDPDSLIVQDHYVFVQLTSGGRPHYYVSYRRNAFAQMKLPKYALPKDMHVISTDENQVFAAVQEWNQNDTYNLYISDTRGVYFTLALENVQSSRGPEGNIMIDLYEVAGIKGMFLANKKIDNQVKTFITYNKGRDWRLLQAPDTDLRGDPVHCLLPYCSLHLHLKVSENPYTSGIIASKDTAPSIIVASGNIGSELSDTDISMFVSSDAGNTWRQIFEEEHSVLYLDQGGVLVAMKHTSLPIRHLWLSFDEGRSWSKYSFTSIPLFVDGVLGEPGEETLIMTVFGHFSHRSEWQLVKVDYKSIFDRRCAEEDYRPWQLHSQGEACIMGAKRIYKKRKSERKCMQGKYAGAMESEPCVCTEADFDCDYGYERHSNGQCLPAFWFNPSSLSKDCSLGQSYLNSTGYRKVVSNNCTDGVREQYTAKPQKCPGKAPRGLRIVTADGKLTAEQGHNVTLMVQLEEGDVQRTLIQVDFGDGIAVSYVNLSSMEDGIKHVYQNVGIFRVTVQVDNSLGSDSAVLYLHVTCPLEHVHLSLPFVTTKNKEVNATAVLWPSQVGTLTYVWWYGNNTEPLITLEGSISFRFTSEGMNTITVQVSAGNAILQDTKTIAVYEEFRSLRLSFSPNLDDYNPDIPEWRRDIGRVIKKSLVEATGVPGQHILVAVLPGLPTTAELFVLPYQDPAGENKRSTDDLEQISELLIHTLNQNSVHFELKPGVRVLVHAAHLTAAPLVDLTPTHSGSAMLMLLSVVFVGLAVFVIYKFKRKIPGINVYAQMQNEKEQEMISPVSHSESRPNVPQTELRRPGQLIDEKVESQLIGSISIVAENQSTKEIPTYVNV

SEQ ID NO: 13 - protein, 1069 aa, Homo sapiens
  MISC_FEATURE (1)..(1069): Mature SorCS1c, Isoform 3
SGADQEKAERGEGASRSPRGVLRDGGQQEPGTRERDPDKATRFRMEELRLTSTTFALTGDSAHNQAMVHWSGHNSSVILILTKLYDYNLGSITESSLWRSTDYGTTYEKLNDKVGLKTILSYLYVCPTNKRKIMLLTDPEIESSLLISSDEGATYQKYRLNFYIQSLLFHPKQEDWILAYSQDQKLYSSAEFGRRWQLIQEGVVPNRFYWSVMGSNKEPDLVHLEARTVDGHSHYLTCRMQNCTEANRNQPFPGYIDPDSLIVQDHYVFVQLTSGGRPHYYVSYRRNAFAQMKLPKYALPKDMHVISTDENQVFAAVQEWNQNDTYNLYISDTRGVYFTLALENVQSSRGPEGNIMIDLYEVAGIKGMFLANKKIDNQVKTFITYNKGRDWRLLQAPDTDLRGDPVHCLLPYCSLHLHLKVSENPYTSGIIASKDTAPSIIVASGNIGSELSDTDISMFVSSDAGNTWRQIFEEEHSVLYLDQGGVLVAMKHTSLPIRHLWLSFDEGRSWSKYSFTSIPLFVDGVLGEPGEETLIMTVFGHFSHRSEWQLVKVDYKSIFDRRCAEEDYRPWQLHSQGEACIMGAKRIYKKRKSERKCMQGKYAGAMESEPCVCTEADFDCDYGYERHSNGQCLPAFWFNPSSLSKDCSLGQSYLNSTGYRKVVSNNCTDGVREQYTAKPQKCPGKAPRGLRIVTADGKLTAEQGHNVTLMVQLEEGDVQRTLIQVDFGDGIAVSYVNLSSMEDGIKHVYQNVGIFRVTVQVDNSLGSDSAVLYLHVTCPLEHVHLSLPFVTTKNKEVNATAVLWPSQVGTLTYVWWYGNNTEPLITLEGSISFRFTSEGMNTITVQVSAGNAILQDTKTIAVYEEFRSLRLSFSPNLDDYNPDIPEWRRDIGRVIKKSLVEATGVPGQHILVAVLPGLPTTAELFVLPYQDPAGENKRSTDDLEQISELLIHTLNQNSVHFELKPGVRVLVHAAHLTAAPLVDLTPTHSGSAMLMLLSVVFVGLAVFVIYKFKRKIPGINVYAQMQNEKEQEMISPVSHSESRPNVPQTELRRPGQLIDEKVESQLIGK

SEQ ID NO: 14 - protein, 1048 aa, Homo sapiens
  MISC_FEATURE (1)..(1048): Mature SorCS1a, Isoform 4
SGADQEKAERGEGASRSPRGVLRDGGQQEPGTRERDPDKATRFRMEELRLTSTTFALTGDSAHNQAMVHWSGHNSSVILILTKLYDYNLGSITESSLWRSTDYGTTYEKLNDKVGLKTILSYLYVCPTNKRKIMLLTDPEIESSLLISSDEGATYQKYRLNFYIQSLLFHPKQEDWILAYSQDQKLYSSAEFGRRWQLIQEGVVPNRFYWSVMGSNKEPDLVHLEARTVDGHSHYLTCRMQNCTEANRNQPFPGYIDPDSLIVQDHYVFVQLTSGGRPHYYVSYRRNAFAQMKLPKYALPKDMHVISTDENQVFAAVQEWNQNDTYNLYISDTRGVYFTLALENVQSSRGPEGNIMIDLYEVAGIKGMFLANKKIDNQVKTFITYNKGRDWRLLQAPDTDLRGDPVHCLLPYCSLHLHLKVSENPYTSGIASKDTAPSIIVASGNIGSELSDTDISMFVSSDAGNTWRQIFEEEHSVLYLDQGGVLVAMKHTSLPIRHLWLSFDEGRSWSKYSFTSIPLFVDGVLGEPGEETLIMTVFGHFSHRSEWQLVKVDYKSIFDRRCAEEDYRPWQLHSQGEACIMGAKRIYKKRKSERKCMQGKYAGAMESEPCVCTEADFDCDYGYERHSNGQCLPAFWFNPSSLSKDCSLGQSYLNSTGYRKVVSNNCTDGVREQYTAKPQKCPGKAPRGLRIVTADGKLTAEQGHNVTLMVQLEEGDVQRTLIQVDFGDGIAVSYVNLSSMEDGIKHVYQNVGIFRVTVQVDNSLGSDSAVLYLHVTCPLEHVHLSLPFVTTKNKEVNATAVLWPSQVGTLTYVWWYGNNTEPLITLEGSISFRFTSEGMNTITVQVSAGNAILQDTKTIAVYEEFRSLRLSFSPNLDDYNPDIPEWRRDIGRVIKKSLVEATGVPGQHILVAVLPGLPTTAELFVLPYQDPAGENKRSTDDLEQISELLIHTLNQNSVHFELKPGVRVLVHAAHLTAAPLVDLTPTHSGSAMLMLLSVVFVGLAVFVIYKFKRCVSLYPRSPTPDLFLLPDRFRSMCYSDVHSSDGFY

SEQ ID NO: 15 - protein, 990 aa, Homo sapiens
  MISC_FEATURE (1)..(990): Soluble mature SorCS1
SGADQEKAERGEGASRSPRGVLRDGGQQEPGTRERDPDKATRFRMEELRLTSTTFALTGDSAHNQAMVHWSGHNSSVILILTKLYDYNLGSITESSLWRSTDYGTTYEKLNDKVGLKTILSYLYVCPTNKRKIMLLTDPEIESSLLISSDEGATYQKYRLNFYIQSLLFHPKQEDWILAYSQDQKLYSSAEFGRRWQLIQEGVVPNRFYWSVMGSNKEPDLVHLEARTVDGHSHYLTCRMQNCTEANRNQPFPGYIDPDSLIVQDHYVFVQLTSGGRPHYYVSYRRNAFAQMKLPKYALPKDMHVISTDENQVFAAVQEWNQNDTYNLYISDTRGVYFTLALENVQSSRGPEGNIMIDLYEVAGIKGMFLANKKIDNQVKTFITYNKGRDWRLLQAPDTDLRGDPVHCLLPYCSLHLHLKVSENPYTSGIIASKDTAPSIIVASGNIGSELSDTDISMFVSSDAGNTWRQIFEEEHSVLYLDQGGVLVAMKHTSLPIRHLWLSFDEGRSWSKYSFTSIPLFVDGVLGEPGEETLIMTVFGHFSHRSEWQLVKVDYKSIFDRRCAEEDYRPWQLHSQGEACIMGAKRIYKKRKSERKCMQGKYAGAMESEPCVCTEADFDCDYGYERHSNGQCLPAFWFNPSSLSKDCSLGQSYLNSTGYRKVVSNNCTDGVREQYTAKPQKCPGKAPRGLRIVTADGKLTAEQGHNVTLMVQLEEGDVQRTLIQVDFGDGIAVSYVNLSSMEDGIKHVYQNVGIFRVTVQVDNSLGSDSAVLYLHVTCPLEHVHLSLPFVTTKNKEVNATAVLWPSQVGTLTYVWWYGNNTEPLITLEGSISFRFTSEGMNTITVQVSAGNAILQDTKTIAVYEEFRSLRLSFSPNLDDYNPDIPEWRRDIGRVIKKSLVEATGVPGQHILVAVLPGLPTTAELFVLPYQDPAGENKRSTDDLEQISELLIHTLNQNSVHFELKPGVRVLVHAAHLTAAPLVDLTPTHSG

SEQ ID NO: 16 - protein, 1167 aa, Mus musculus
  MISC_FEATURE (1)..(1167): preproSorCS1b, isoform 1
MGKVGAGDGSSAGLSALLAGAGLLMLLAPGVCSSLSCCPPQHPSSTPRRTLTPRGFPHPGPLGRAPATPPPLFMRPLFAVAPGDRALFLERAGGSRVSVATAARSGRRRRSGTEPEKIEPGEGASRSRRDMLKDGGQQGLGTGARDPGKATRFRMEELRLTSTTFALTGDSAHNQAMVHWSGHNSSVILILTKLYDYNLGSITESSLWRSTDYGTTYEKLNDKVGLKTILSYLYVCPTNKCKIMLLTDPEIESSLLISSDEGATYQKYRLNFYLQSLLFHPKQEDWILAYSQDQKLYSSAEFGRRWQLIQESVVPNRFYWSVMGSSKEPDLVHLEARTVDGHSIYLTCRMQNCTEANRNKPFPGYIDPDSLIVQDDYVFVQLTSGGRPHYYVSYRRSPFAQMKLPKYALPKDMHVISTDENQVFAAVQEWNQNDTYNLYISDTRGVYFTLALENVRSSRGPEGNVMIDLYEVAGIKGMFLANKKIDNQVKTFITYNKGRDWRLLQAPDADLRGDPVHCLLPYCSLHLHLKVSENPYTSGIIASRDTAPSIIVASGNIGSELSDSDISMFVSSDAGNTWRQIFEEEHSILYLDQGGVLVAMKHTSLPIRHLWLSFDEGRSWSKYSFTSIPLFVDGVLGEPGEETLIMTVFGHFSHRSEWQLVKVDYKSIFDRRCAEEDYRPWQLHSQGEACIMGAKRIYKKRKSERKCMQKYAGAMESEPCVCTEADFDCDYGYERHSNGQCLPAFWFNPSSLSKDCSLGQSYLNSAGYRKVVSNNCTDGVREQYTAKPQKCPGKAPRGLRIVTADGKLTAEQGHNVTLMVQLEEGDVQRTLIQVDFGDGIAVSYVNLSSMEDGIKHVYQNVGIFRVTVQVDNSLGSDSAVLYLHVTCPLEHVHLSLPFVTTKNKEVNATAVLWPSQVGTLTYVWWYGNNTEPLITLEGSISFKFTSEGMNTITVQVSAGNAILQDTKTIAVYEEFRSLRLAFSPNLDDYNPDIPEWRRDISRVIKKSLVEATGIPSQHILVAVLPGLPTAAELFVLPYQDGTRENKRSPEDLEQISEVLIHKLNQNLVHFELKPGVQVLVHAAHLTAAPLVDLTPTHSGSAMLMLLSVVFVGLAVFVIYKFKRRVALPSPPSPSAQPGDSSLRLQRPRPATPPSSPKRGSAGAQFAI

SEQ ID NO: 17 - protein, 1147 aa, Mus musculus
  MISC_FEATURE (1)..(1147): preproSorCS1b, isoform 2
MGKVGAGDGSSAGLSALLAGAGLLMLLAPGVCSSLSCCPPQHPSSTPRRTLTPRGFPHPGPLGRAPATPPPLFMRPLFAVAPGDRALFLERAGGSRVSVATAARSGRRRRSGTEPEKIEPGEGASRSRRDMLKDGGQQGLGTGARDPGKATRFRMEELRLTSTTFALTGDSAHNQAMVHWSGHNSSVILILTKLYDYNLGSITESSLWRSTDYGTTYEKLNDKVGLKTILSYLYVCPTNKCKIMLLTDPEIESSLLISSDEGATYQKYRLNFYLQSLLFHPKQEDWILAYSQDQKLYSSAEFGRRWQLIQESVVPNRFYWSVMGSSKEPDLVHLEARTVDGHSIYLTCRMQNCTEANRNKPFPGYIDPDSLIVQDDYVFVQLTSGGRPHYYVSYRRSPFAQMKLPKYALPKDMHVISTDENQVFAAVQEWNQNDTYNLYISDTRGVYFTLALENVRSSRGPEGNVMIDLYEVAGIKGMFLANKKIDNQVKTFITYNKGRDWRLLQAPDADLRGDPVHCLLPYCSLHLHLKVSENPYTSGIIASRDTAPSIIVASGNIGSELSDSDISMFVSSDAGNTWRQIFEEEHSILYLDQGGVLVAMKHTSLPIRHLWLSFDEGRSWSKYSFTSIPLFVDGVLGEPGEETLIMTVFGHFSHRSEWQLVKVDYKSIFDRRCAEEDYRPWQLHSQGEACIMGAKRIYKKRKSERKCMQKYAGAMESEPCVCTEADFDCDYGYERHSNGQCLPAFWFNPSSLSKDCSLGQSYLNSAGYRKVVSNNCTDGVREQYTAKPQKCPGKAPRGLRIVTADGKLTAEQGHNVTLMVQLEEGDVQRTLIQVDFGDGIAVSYVNLSSMEDGIKHVYQNVGIFRVTVQVDNSLGSDSAVLYLHVTCPLEHVHLSLPFVTTKNKEVNATAVLWPSQVGTLTYVWWYGNNTEPLITLEGSISFKFTSEGMNTITVQVSAGNAILQDTKTIAVYEEFRSLRLAFSPNLDDYNPDIPEWRRDISRVIKKSLVEATGIPSQHILVAVLPGLPTAAELFVLPYQDGTRENKRSPEDLEQISEVLIHKLNQNLVHFELKPGVQVLVHAAHLTAAPLVDLTPTHSGSAMLMLLSVVFVGLAVFVIYKFKRCVFLLLPSYPRPPPPSSFCQVQKQ

SEQ ID NO: 18 - protein, 1178 aa, Mus musculus
  MISC_FEATURE (1)..(1178): preproSorCS1c, isoform 3
MGKVGAGDGSSAGLSALLAGAGLLMLLAPGVCSSLSCCPPQHPSSTPRRTLTPRGFPHPGPLGRAPATPPPLFMRPLFAVAPGDRALFLERAGGSRVSVATAARSGRRRRSGTEPEKIEPGEGASRSRRDMLKDGGQQGLGTGARDPGKATRFRMEELRLTSTTFALTGDSAHNQAMVHWSGHNSSVILILTKLYDYNLGSITESSLWRSTDYGTTYEKLNDKVGLKTILSYLYVCPTNKCKIMLLTDPEIESSLLISSDEGATYQKYRLNFYLQSLLFHPKQEDWILAYSQDQKLYSSAEFGRRWQLIQESVVPNRFYWSVMGSSKEPDLVHLEARTVDGHSIYLTCRMQNCTEANRNKPFPGYIDPDSLIVQDDYVFVQLTSGGRPHYYVSYRRSPFAQMKLPKYALPKDMHVISTDENQVFAAVQEWNQNDTYNLYISDTRGVYFTLALENVRSSRGPEGNVMIDLYEVAGIKGMFLANKKIDNQVKTFITYNKGRDWRLLQAPDADLRGDPVHCLLPYCSLHLHLKVSENPYTSGIIASRDTAPSIIVASGNIGSELSDSDISMFVSSDAGNTWRQIFEEEHSILYLDQGGVLVAMKHTSLPIRHLWLSFDEGRSWSKYSFTSIPLFVDGVLGEPGEETLIMTVFGHFSHRSEWQLVKVDYKSIFDRRCAEEDYRPWQLHSQGEACIMGAKRIYKKRKSERKCMQKYAGAMESEPCVCTEADFDCDYGYERHSNGQCLPAFWFNPSSLSKDCSLGQSYLNSAGYRKVVSNNCTDGVREQYTAKPQKCPGKAPRGLRIVTADGKLTAEQGHNVTLMVQLEEGDVQRTLIQVDFGDGIAVSYVNLSSMEDGIKHVYQNVGIFRVTVQVDNSLGSDSAVLYLHVTCPLEHVHLSLPFVTTKNKEVNATAVLWPSQVGTLTYVWWYGNNTEPLITLEGSISFKFTSEGMNTITVQVSAGNAILQDTKTIAVYEEFRSLRLAFSPNLDDYNPDIPEWRRDISRVIKKSLVEATGIPSQHILVAVLPGLPTAAELFVLPYQDGTRENKRSPEDLEQISEVLIHKLNQNLVHFELKPGVQVLVHAAHLTAAPLVDLTPTHSGSAMLMLLSVVFVGLAVFVIYKFKRKIPGINVYAQMQNEKEQELINPVSHSESRPSVPHPDLRRPGQLVDEKVESQLLGK

SEQ ID NO: 19 - protein, 1178 aa, Mus musculus
  MISC_FEATURE (1)..(1178): preproSorCS1c+, isoform 4
MGKVGAGDGSSAGLSALLAGAGLLMLLAPGVCSSLSCCPPQHPSSTPRRTLTPRGFPHPGPLGRAPATPPPLFMRPLFAVAPGDRALFLERAGGSRVSVATAARSGRRRRSGTEPEKIEPGEGASRSRRDMLKDGGQQGLGTGARDPGKATRFRMEELRLTSTTFALTGDSAHNQAMVHWSGHNSSVILILTKLYDYNLGSITESSLWRSTDYGTTYEKLNDKVGLKTILSYLYVCPTNKCKIMLLTDPEIESSLLISSDEGATYQKYRLNFYLQSLLFHPKQEDWILAYSQDQKLYSSAEFGRRWQLIQESVVPNRFYWSVMGSSKEPDLVHLEARTVDGHSIYLTCRMQNCTEANRNKPFPGYIDPDSLIVQDDYVFVQLTSGGRPHYYVSYRRSPFAQMKLPKYALPKDMHVISTDENQVFAAVQEWNQNDTYNLYISDTRGVYFTLALENVRSSRGPEGNVMIDLYEVAGIKGMFLANKKIDNQVKTFITYNKGRDWRLLQAPDADLRGDPVHCLLPYCSLHLHLKVSENPYTSGIIASRDTAPSIIVASGNIGSELSDSDISMFVSSDAGNTWRQIFEEEHSILYLDQGGVLVAMKHTSLPIRHLWLSFDEGRSWSKYSFTSIPLFVDGVLGEPGEETLIMTVFGHFSHRSEWQLVKVDYKSIFDRRCAEEDYRPWQLHSQGEACIMGAKRIYKKRKSERKCMQKYAGAMESEPCVCTEADFDCDYGYERHSNGQCLPAFWFNPSSLSKDCSLGQSYLNSAGYRKVVSNNCTDGVREQYTAKPQKCPGKAPRGLRIVTADGKLTAEQGHNVTLMVQLEEGDVQRTLIQVDFGDGIAVSYVNLSSMEDGIKHVYQNVGIFRVTVQVDNSLGSDSAVLYLHVTCPLEHVHLSLPFVTTKNKEVNATAVLWPSQVGTLTYVWWYGNNTEPLITLEGSISFKFTSEGMNTITVQVSAGNAILQDTKTIAVYEEFRSLRLAFSPNLDDYNPDIPEWRRDISRVIKKSLVEATGIPSQHILVAVLPGLPTAAELFVLPYQDGTRENKRSPEDLEQISEVLIHKLNQNLVHFELKPGVQVLVHAAHLTAAPLVDLTPTHSGSAMLMLLSVVFVGLAVFVIYKFKRKIPGINVYAQMQNEKEQELINPVSHSESRSSVPHPDLRRPGQLVDEKVESQLLGE

SEQ ID NO: 20 - protein, 1191 aa, Mus musculus
  MISC_FEATURE (1)..(1191): preproSorCS1d
MGKVGAGDGSSAGLSALLAGAGLLMLLAPGVCSSLSCCPPQHPSSTPRRTLTPRGFPHPGPLGRAPATPPPLFMRPLFAVAPGDRALFLERAGGSRVSVATAARSGRRRRSGTEPEKIEPGEGASRSRRDMLKDGGQQGLGTGARDPGKATRFRMEELRLTSTTFALTGDSAHNQAMVHWSGHNSSVILILTKLYDYNLGSITESSLWRSTDYGTTYEKLNDKVGLKTILSYLYVCPTNKCKIMLLTDPEIESSLLISSDEGATYQKYRLNFYLQSLLFHPKQEDWILAYSQDQKLYSSAEFGRRWQLIQESVVPNRFYWSVMGSSKEPDLVHLEARTVDGHSIYLTCRMQNCTEANRNKPFPGYIDPDSLIVQDDYVFVQLTSGGRPHYYVSYRRSPFAQMKLPKYALPKDMHVISTDENQVFAAVQEWNQNDTYNLYISDTRGVYFTLALENVRSSRGPEGNVMIDLYEVAGIKGMFLANKKIDNQVKTFITYNKGRDWRLLQAPDADLRGDPVHCLLPYCSLHLHLKVSENPYTSGIIASRDTAPSIIVASGNIGSELSDSDISMFVSSDAGNTWRQIFEEEHSILYLDQGGVLVAMKHTSLPIRHLWLSFDEGRSWSKYSFTSIPLFVDGVLGEPGEETLIMTVFGHFSHRSEWQLVKVDYKSIFDRRCAEEDYRPWQLHSQGEACIMGAKRIYKKRKSERKCMQKYAGAMESEPCVCTEADFDCDYGYERHSNGQCLPAFWFNPSSLSKDCSLGQSYLNSAGYRKVVSNNCTDGVREQYTAKPQKCPGKAPRGLRIVTADGKLTAEQGHNVTLMVQLEEGDVQRTLIQVDFGDGIAVSYVNLSSMEDGIKHVYQNVGIFRVTVQVDNSLGSDSAVLYLHVTCPLEHVHLSLPFVTTKNKEVNATAVLWPSQVGTLTYVWWYGNNTEPLITLEGSISFKFTSEGMNTITVQVSAGNAILQDTKTIAVYEEFRSLRLAFSPNLDDYNPDIPEWRRDISRVIKKSLVEATGIPSQHILVAVLPGLPTAAELFVLPYQDGTRENKRSPEDLEQISEVLIHKLNQNLVHFELKPGVQVLVHAAHLTAAPLVDLTPTHSGSAMLMLLSVVFVGLAVFVIYKFKRGWRDRSAVKNIGCSCRGPGFNSQHQQGGSQASVTSVPRDPSPSSDLHGHQEHTWCTDIHPGKTPIHIK

SEQ ID NO: 21 - protein, 1099 aa, Mus musculus
  MISC_FEATURE (1)..(1099): Soluble preproSorCS1
MGKVGAGDGSSAGLSALLAGAGLLMLLAPGVCSSLSCCPPQHPSSTPRRTLTPRGFPHPGPLGRAPATPPPLFMRPLFAVAPGDRALFLERAGGSRVSVATAARSGRRRRSGTEPEKIEPGEGASRSRRDMLKDGGQQGLGTGARDPGKATRFRMEELRLTSTTFALTGDSAHNQAMVHWSGHNSSVILILTKLYDYNLGSITESSLWRSTDYGTTYEKLNDKVGLKTILSYLYVCPTNKCKIMLLTDPEIESSLLISSDEGATYQKYRLNFYLQSLLFHPKQEDWILAYSQDQKLYSSAEFGRRWQLIQESVVPNRFYWSVMGSSKEPDLVHLEARTVDGHSIYLTCRMQNCTEANRNKPFPGYIDPDSLIVQDDYVFVQLTSGGRPHYYVSYRRSPFAQMKLPKYALPKDMHVISTDENQVFAAVQEWNQNDTYNLYISDTRGVYFTLALENVRSSRGPEGNVMIDLYEVAGIKGMFLANKKIDNQVKTFITYNKGRDWRLLQAPDADLRGDPVHCLLPYCSLHLHLKVSENPYTSGIIASRDTAPSIIVASGNIGSELSDSDISMFVSSDAGNTWRQIFEEEHSILYLDQGGVLVAMKHTSLPIRHLWLSFDEGRSWSKYSFTSIPLFVDGVLGEPGEETLIMTVFGHFSHRSEWQLVKVDYKSIFDRRCAEEDYRPWQLHSQGEACIMGAKRIYKKRKSERKCMQKYAGAMESEPCVCTEADFDCDYGYERHSNGQCLPAFWFNPSSLSKDCSLGQSYLNSAGYRKVVSNNCTDGVREQYTAKPQKCPGKAPRGLRIVTADGKLTAEQGHNVTLMVQLEEGDVQRTLIQVDFGDGIAVSYVNLSSMEDGIKHVYQNVGIFRVTVQVDNSLGSDSAVLYLHVTCPLEHVHLSLPFVTTKNKEVNATAVLWPSQVGTLTYVWWYGNNTEPLITLEGSISFKFTSEGMNTITVQVSAGNAILQDTKTIAVYEEFRSLRLAFSPNLDDYNPDIPEWRRDISRVIKKSLVEATGIPSQHILVAVLPGLPTAAELFVLPYQDGTRENKRSPEDLEQISEVLIHKLNQNLVHFELKPGVQVLVHAAHLTAAPLVDLTPTHSG

SEQ ID NO: 22 - protein, 1134 aa, Mus musculus
  MISC_FEATURE (1)..(1134): proSorCS1b (isoform 1)
SLSCCPPQHPSSTPRRTLTPRGFPHPGPLGRAPATPPPLFMRPLFAVAPGDRALFLERAGGSRVSVATAARSGRRRRSGTEPEKIEPGEGASRSRRDMLKDGGQQGLGTGARDPGKATRFRMEELRLTSTTFALTGDSAHNQAMVHWSGHNSSVILILTKLYDYNLGSITESSLWRSTDYGTTYEKLNDKVGLKTILSYLYVCPTNKCKIMLLTDPEIESSLLISSDEGATYQKYRLNFYLQSLLFHPKQEDWILAYSQDQKLYSSAEFGRRWQLIQESVVPNRFYWSVMGSSKEPDLVHLEARTVDGHSIYLTCRMQNCTEANRNKPFPGYIDPDSLIVQDDYVFVQLTSGGRPHYYVSYRRSPFAQMKLPKYALPKDMHVISTDENQVFAAVQEWNQNDTYNLYISDTRGVYFTLALENVRSSRGPEGNVMIDLYEVAGIKGMFLANKKIDNQVKTFITYNKGRDWRLLQAPDADLRGDPVHCLLPYCSLHLHLKVSENPYTSGIIASRDTAPSIIVASGNIGSELSDSDISMFVSSDAGNTWRQIFEEEHSILYLDQGGVLVAMKHTSLPIRHLWLSFDEGRSWSKYSFTSIPLFVDGVLGEPGEETLIMTVFGHFSHRSEWQLVKVDYKSIFDRRCAEEDYRPWQLHSQGEACIMGAKRIYKKRKSERKCMQKYAGAMESEPCVCTEADFDCDYGYERHSNGQCLPAFWFNPSSLSKDCSLGQSYLNSAGYRKVVSNNCTDGVREQYTAKPQKCPGKAPRGLRIVTADGKLTAEQGHNVTLMVQLEEGDVQRTLIQVDFGDGIAVSYVNLSSMEDGIKHVYQNVGIFRVTVQVDNSLGSDSAVLYLHVTCPLEHVHLSLPFVTTKNKEVNATAVLWPSQVGTLTYVWWYGNNTEPLITLEGSISFKFTSEGMNTITVQVSAGNAILQDTKTIAVYEEFRSLRLAFSPNLDDYNPDIPEWRRDISRVIKKSLVEATGIPSQHILVAVLPGLPTAAELFVLPYQDGTRENKRSPEDLEQISEVLIHKLNQNLVHFELKPGVQVLVHAAHLTAAPLVDLTPTHSGSAMLMLLSVVFVGLAVFVIYKFKRRVALPSPPSPSAQPGDSSLRLQRPRPATPPSSPKRGSAGAQFAI

SEQ ID NO: 23 - protein, 1114 aa, Mus musculus
  MISC_FEATURE (1)..(1114): proSorCS1a, isoform 2
SLSCCPPQHPSSTPRRTLTPRGFPHPGPLGRAPATPPPLFMRPLFAVAPGDRALFLERAGGSRVSVATAARSGRRRRSGTEPEKIEPGEGASRSRRDMLKDGGQQGLGTGARDPGKATRFRMEELRLTSTTFALTGDSAHNQAMVHWSGHNSSVILILTKLYDYNLGSITESSLWRSTDYGTTYEKLNDKVGLKTILSYLYVCPTNKCKIMLLTDPEIESSLLISSDEGATYQKYRLNFYLQSLLFHPKQEDWILAYSQDQKLYSSAEFGRRWQLIQESVVPNRFYWSVMGSSKEPDLVHLEARTVDGHSIYLTCRMQNCTEANRNKPFPGYIDPDSLIVQDDYVFVQLTSGGRPHYYVSYRRSPFAQMKLPKYALPKDMHVISTDENQVFAAVQEWNQNDTYNLYISDTRGVYFTLALENVRSSRGPEGNVMIDLYEVAGIKGMFLANKKIDNQVKTFITYNKGRDWRLLQAPDADLRGDPVHCLLPYCSLHLHLKVSENPYTSGIIASRDTAPSIIVASGNIGSELSDSDISMFVSSDAGNTWRQIFEEEHSILYLDQGGVLVAMKHTSLPIRHLWLSFDEGRSWSKYSFTSIPLFVDGVLGEPGEETLIMTVFGHFSHRSEWQLVKVDYKSIFDRRCAEEDYRPWQLHSQGEACIMGAKRIYKKRKSERKCMQKYAGAMESEPCVCTEADFDCDYGYERHSNGQCLPAFWFNPSSLSKDCSLGQSYLNSAGYRKVVSNNCTDGVREQYTAKPQKCPGKAPRGLRIVTADGKLTAEQGHNVTLMVQLEEGDVQRTLIQVDFGDGIAVSYVNLSSMEDGIKHVYQNVGIFRVTVQVDNSLGSDSAVLYLHVTCPLEHVHLSLPFVTTKNKEVNATAVLWPSQVGTLTYVWWYGNNTEPLITLEGSISFKFTSEGMNTITVQVSAGNAILQDTKTIAVYEEFRSLRLAFSPNLDDYNPDIPEWRRDISRVIKKSLVEATGIPSQHILVAVLPGLPTAAELFVLPYQDGTRENKRSPEDLEQISEVLIHKLNQNLVHFELKPGVQVLVHAAHLTAAPLVDLTPTHSGSAMLMLLSVVFVGLAVFVIYKFKRCVFLLLPSYPRPPPPSSFCQVQKQ

SEQ ID NO: 24 - protein, 1145 aa, Mus musculus
  MISC_FEATURE (1)..(1145): proSorCS1c, isoform 3
SLSCCPPQHPSSTPRRTLTPRGFPHPGPLGRAPATPPPLFMRPLFAVAPGDRALFLERAGGSRVSVATAARSGRRRRSGTEPEKIEPGEGASRSRRDMLKDGGQQGLGTGARDPGKATRFRMEELRLTSTTFALTGDSAHNQAMVHWSGHNSSVILILTKLYDYNLGSITESSLWRSTDYGTTYEKLNDKVGLKTILSYLYVCPTNKCKIMLLTDPEIESSLLISSDEGATYQKYRLNFYLQSLLFHPKQEDWILAYSQDQKLYSSAEFGRRWQLIQESVVPNRFYWSVMGSSKEPDLVHLEARTVDGHSIYLTCRMQNCTEANRNKPFPGYIDPDSLIVQDDYVFVQLTSGGRPHYYVSYRRSPFAQMKLPKYALPKDMHVISTDENQVFAAVQEWNQNDTYNLYISDTRGVYFTLALENVRSSRGPEGNVMIDLYEVAGIKGMFLANKKIDNQVKTFITYNKGRDWRLLQAPDADLRGDPVHCLLPYCSLHLHLKVSENPYTSGIIASRDTAPSIIVASGNIGSELSDSDISMFVSSDAGNTWRQIFEEEHSILYLDQGGVLVAMKHTSLPIRHLWLSFDEGRSWSKYSFTSIPLFVDGVLGEPGEETLIMTVFGHFSHRSEWQLVKVDYKSIFDRRCAEEDYRPWQLHSQGEACIMGAKRIYKKRKSERKCMQKYAGAMESEPCVCTEADFDCDYGYERHSNGQCLPAFWFNPSSLSKDCSLGQSYLNSAGYRKVVSNNCTDGVREQYTAKPQKCPGKAPRGLRIVTADGKLTAEQGHNVTLMVQLEEGDVQRTLIQVDFGDGIAVSYVNLSSMEDGIKHVYQNVGIFRVTVQVDNSLGSDSAVLYLHVTCPLEHVHLSLPFVTTKNKEVNATAVLWPSQVGTLTYVWWYGNNTEPLITLEGSISFKFTSEGMNTITVQVSAGNAILQDTKTIAVYEEFRSLRLAFSPNLDDYNPDIPEWRRDISRVIKKSLVEATGIPSQHILVAVLPGLPTAAELFVLPYQDGTRENKRSPEDLEQISEVLIHKLNQNLVHFELKPGVQVLVHAAHLTAAPLVDLTPTHSGSAMLMLLSVVFVGLAVFVIYKFKRKIPGINVYAQMQNEKEQELINPVSHSESRPSVPHPDLRRPGQLVDEKVESQLLGK

SEQ ID NO: 25 - protein, 1144 aa, Mus musculus
  MISC_FEATURE (1)..(1144): proSorCS1c+, isoform 4
SLSCCPPQHPSSTPRRTLTPRGFPHPGPLGRAPATPPPLFMRPLFAVAPGDRALFLERAGGSRVSVATAARSGRRRRSGTEPEKIEPGEGASRSRRDMLKDGGQQGLGTGARDPGKATRFRMEELRLTSTTFALTGDSAHNQAMVWSGHNSSVILILTKLYDYNLGSITESSLWRSTDYGTTYEKLNDKVGLKTILSYLYVCPTNKCKIMLLTDPEIESSLLISSDEGATYQKYRLNFYLQSLLFHPKQEDWILAYSQDQKLYSSAEFGRRWQLIQESVVPNRFYWSVMGSSKEPDLVHLEARTVDGHSIYLTCRMQNCTEANRNKPFPGYIDPDSLIVQDDYVFVQLTSGGRPHYYVSYRRSPFAQMKLPKYALPKDMHVISTDENQVFAAVQEWNQNDTYNLYISDTRGVYFTLALENVRSSRGPEGNVMIDLYEVAGIKGMFLANKKIDNQVKTFITYNKGRDWRLLQAPDADLRGDPVHCLLPYCSLHLHLKVSENPYTSGIIASRDTAPSIIVASGNIGSELSDSDISMFVSSDAGNTWRQIFEEEHSILYLDQGGVLVAMKHTSLPIRHLWLSFDEGRSWSKYSFTSIPLFVDGVLGEPGEETLIMTVFGHFSHRSEWQLVKVDYKSIFDRRCAEEDYRPWQLHSQGEACIMGAKRIYKKRKSERKCMQKYAGAMESEPCVCTEADFDCDYGYERHSNGQCLPAFWFNPSSLSKDCSLGQSYLNSAGYRKVVSNNCTDGVREQYTAKPQKCPGKAPRGLRIVTADGKLTAEQGHNVTLMVQLEEGDVQRTLIQVDFGDGIAVSYVNLSSMEDGIKHVYQNVGIFRVTVQVDNSLGSDSAVLYLHVTCPLEHVHLSLPFVTTKNKEVNATAVLWPSQVGTLTYVWWYGNNTEPLITLEGSISFKFTSEGMNTITVQVSAGNAILQDTKTIAVYEEFRSLRLAFSPNLDDYNPDIPEWRRDISRVIKKSLVEATGIPSQHILVAVLPGLPTAAELFVLPYQDGTRENKRSPEDLEQISEVLIHKLNQNLVHFELKPGVQVLVHAAHLTAAPLVDLTPTHSGSAMLMLLSVVFVGLAVFVIYKFKRKIPGINVYAQMQNEKEQELINPVSHSESRSSVPHPDLRRPGQLVDEKVESQLLGE

SEQ ID NO: 26 - protein, 1158 aa, Mus musculus
  MISC_FEATURE (1)..(1158): proSorCS1d
SLSCCPPQHPSSTPRRTLTPRGFPHPGPLGRAPATPPPLFMRPLFAVAPGDRALFLERAGGSRVSVATAARSGRRRRSGTEPEKIEPGEGASRSRRDMLKDGGQQGLGTGARDPGKATRFRMEELRLTSTTFALTGDSAHNQAMVHWSGHNSSVILILTKLYDYNLGSITESSLWRSTDYGTTYEKLNDKVGLKTILSYLYVCPTNKCKIMLLTDPEIESSLLISSDEGATYQKYRLNFYLQSLLFHPKQEDWILAYSQDQKLYSSAEFGRRWQLIQESVVPNRFYWSVMGSSKEPDLVHLEARTVDGHSIYLTCRMQNCTEANRNKPFPGYIDPDSLIVQDDYVFVQLTSGGRPHYYVSYRRSPFAQMKLPKYALPKDMHVISTDENQVFAAVQEWNQNDTYNLYISDTRGVYFTLALENVRSSRGPEGNVMIDLYEVAGIKGMFLANKKIDNQVKTFITYNKGRDWRLLQAPDADLRGDPVHCLLPYCSLHLHLKVSENPYTSGIIASRDTAPSIIVASGNIGSELSDSDISMFVSSDAGNTWRQIFEEEHSILYLDQGGVLVAMKHTSLPIRHLWLSFDEGRSWSKYSFTSIPLFVDGVLGEPGEETLIMTVFGHFSHRSEWQLVKVDYKSIFDRRCAEEDYRPWQLHSQGEACIMGAKRIYKKRKSERKCMQKYAGAMESEPCVCTEADFDCDYGYERHSNGQCLPAFWFNPSSLSKDCSLGQSYLNSAGYRKVVSNNCTDGVREQYTAKPQKCPGKAPRGLRIVTADGKLTAEQGHNVTLMVQLEEGDVQRTLIQVDFGDGIAVSYVNLSSMEDGIKHVYQNVGIFRVTVQVDNSLGSDSAVLYLHVTCPLEHVHLSLPFVTTKNKEVNATAVLWPSQVGTLTYVWWYGNNTEPLITLEGSISFKFTSEGMNTITVQVSAGNAILQDTKTIAVYEEFRSLRLAFSPNLDDYNPDIPEWRRDISRVIKKSLVEATGIPSQHILVAVLPGLPTAAELFVLPYQDGTRENKRSPEDLEQISEVLIHKLNQNLVHFELKPGVQVLVHAAHLTAAPLVDLTPTHSGSAMLMLLSVVFVGLAVFVIYKFKRGWRDRSAVKNIGCSCRGPGFNSQHQQGGSQASVTSVPRDPSPSSDLHGHQEHTWCTDIHPGKTPIHIK

SEQ ID NO: 27 - protein, 1066 aa, Mus musculus
  MISC_FEATURE (1)..(1066): Soluble proSorCS1
SLSCCPPQHPSSTPRRTLTPRGFPHPGPLGRAPATPPPLFMRPLFAVAPGDRALFLERAGGSRVSVATAARSGRRRRSGTEPEKIEPGEGASRSRRDMLKDGGQQGLGTGARDPGKATRFRMEELRLTSTTFALTGDSAHNQAMVHWSGHNSSVILILTKLYDYNLGSITESSLWRSTDYGTTYEKLNDKVGLKTILSYLYVCPTNKCKIMLLTDPEIESSLLISSDEGATYQKYRLNFYLQSLLFHPKQEDWILAYSQDQKLYSSAEFGRRWQLIQESVVPNRFYWSVMGSSKEPDLVHLEARTVDGHSIYLTCRMQNCTEANRNKPFPGYIDPDSLIVQDDYVFVQLTSGGRPHYYVSYRRSPFAQMKLPKYALPKDMHVISTDENQVFAAVQEWNQNDTYNLYISDTRGVYFTLALENVRSSRGPEGNVMIDLYEVAGIKGMFLANKKIDNQVKTFITYNKGRDWRLLQAPDADLRGDPVHCLLPYCSLHLHLKVSENPYTSGIIASRDTAPSIIVASGNIGSELSDSDISMFVSSDAGNTWRQIFEEEHSILYLDQGGVLVAMKHTSLPIRHLWLSFDEGRSWSKYSFTSIPLFVDGVLGEPGEETLIMTVFGHFSHRSEWQLVKVDYKSIFDRRCAEEDYRPWQLHSQGEACIMGAKRIYKKRKSERKCMQKYAGAMESEPCVCTEADFDCDYGYERHSNGQCLPAFWFNPSSLSKDCSLGQSYLNSAGYRKVVSNNCTDGVREQYTAKPQKCPGKAPRGLRIVTADGKLTAEQGHNVTLMVQLEEGDVQRTLIQVDFGDGIAVSYVNLSSMEDGIKHVYQNVGIFRVTVQVDNSLGSDSAVLYLHVTCPLEHVHLSLPFVTTKNKEVNATAVLWPSQVGTLTYVWWYGNNTEPLITLEGSISFKFTSEGMNTITVQVSAGNAILQDTKTIAVYEEFRSLRLAFSPNLDDYNPDIPEWRRDISRVIKKSLVEATGIPSQHILVAVLPGLPTAAELFVLPYQDGTRENKRSPEDLEQISEVLIHKLNQNLVHFELKPGVQVLVHAAHLTAAPLVDLTPTHSG

SEQ ID NO: 28 - protein, 1057 aa, Mus musculus
  MISC_FEATURE (1)..(1057): mature SorCS1b, isoform 1
SGTEPEKIEPGEGASRSRRDMLKDGGQQGLGTGARDPGKATRFRMEELRLTSTTFALTGDSAHNQAMVHWSGHNSSVILILTKLYDYNLGSITESSLWRSTDYGTTYEKLNDKVGLKTILSYLYVCPTNKCKIMLLTDPEIESSLLISSDEGATYQKYRLNFYLQSLLFHPKQEDWILAYSQDQKLYSSAEFGRRWQLIQESVVPNRFYWSVMGSSKEPDLVHLEARTVDGHSIYLTCRMQNCTEANRNKPFPGYIDPDSLIVQDDYVFVQLTSGGRPHYYVSYRRSPFAQMKLPKYALPKDMHVISTDENQVFAAVQEWNQNDTYNLYISDTRGVYFTLALENVRSSRGPEGNVMIDLYEVAGIKGMFLANKKIDNQVKTFITYNKGRDWRLLQAPDADLRGDPVHCLLPYCSLHLHLKVSENPYTSGIIASRDTAPSIIVASGNIGSELSDSDISMFVSSDAGNTWRQIFEEEHSILYLDQGGVLVAMKHTSLPIRHLWLSFDEGRSWSKYSFTSIPLFVDGVLGEPGEETLIMTVFGHFSHRSEWQLVKVDYKSIFDRRCAEEDYRPWQLHSQGEACIMGAKRIYKKRKSERKCMQKYAGAMESEPCVCTEADFDCDYGYERHSNGQCLPAFWFNPSSLSKDCSLGQSYLNSAGYRKVVSNNCTDGVREQYTAKPQKCPGKAPRGLRIVTADGKLTAEQGHNVTLMVQLEEGDVQRTLIQVDFGDGIAVSYVNLSSMEDGIKHVYQNVGIFRVTVQVDNSLGSDSAVLYLHVTCPLEHVHLSLPFVTTKNKEVNATAVLWPSQVGTLTYVWWYGNNTEPLITLEGSISFKFTSEGMNTITVQVSAGNAILQDTKTIAVYEEFRSLRLAFSPNLDDYNPDIPEWRRDISRVIKKSLVEATGIPSQHILVAVLPGLPTAAELFVLPYQDGTRENKRSPEDLEQISEVLIHKLNQNLVHFELKPGVQVLVHAAHLTAAPLVDLTPTHSGSAMLMLLSVVFVGLAVFVIYKFKRRVALPSPPSPSAQPGDSSLRLQRPRPATPPSSPKRGSAGAQFAI

SEQ ID NO: 29 - protein, 1037 aa, Mus musculus
  MISC_FEATURE (1)..(1037): mature SorCS1a, isoform 2
SGTEPEKIEPGEGASRSRRDMLKDGGQQGLGTGARDPGKATRFRMEELRLTSTTFALTGDSAHNQAMVHWSGHNSSVILILTKLYDYNLGSITESSLWRSTDYGTTYEKLNDKVGLKTILSYLYVCPTNKCKIMLLTDPEIESSLLISSDEGATYQKYRLNFYLQSLLFHPKQEDWILAYSQDQKLYSSAEFGRRWQLIQESVVPNRFYWSVMGSSKEPDLVHLEARTVDGHSIYLTCRMQNCTEANRNKPFPGYIDPDSLIVQDDYVFVQLTSGGRPHYYVSYRRSPFAQMKLPKYALPKDMHVISTDENQVFAAVQEWNQNDTYNLYISDTRGVYFTLALENVRSSRGPEGNVMIDLYEVAGIKGMFLANKKIDNQVKTFITYNKGRDWRLLQAPDADLRGDPVHCLLPYCSLHLHLKVSENPYTSGIIASRDTAPSIIVASGNIGSELSDSDISMFVSSDAGNTWRQIFEEEHSILYLDQGGVLVAMKHTSLPIRHLWLSFDEGRSWSKYSFTSIPLFVDGVLGEPGEETLIMTVFGHFSHRSEWQLVKVDYKSIFDRRCAEEDYRPWQLHSQGEACIMGAKRIYKKRKSERKCMQKYAGAMESEPCVCTEADFDCDYGYERHSNGQCLPAFWFNPSSLSKDCSLGQSYLNSAGYRKVVSNNCTDGVREQYTAKPQKCPGKAPRGLRIVTADGKLTAEQGHNVTLMVQLEEGDVQRTLIQVDFGDGIAVSYVNLSSMEDGIKHVYQNVGIFRVTVQVDNSLGSDSAVLYLHVTCPLEHVHLSLPFVTTKNKEVNATAVLWPSQVGTLTYVWWYGNNTEPLITLEGSISFKFTSEGMNTITVQVSAGNAILQDTKTIAVYEEFRSLRLAFSPNLDDYNPDIPEWRRDISRVIKKSLVEATGIPSQHILVAVLPGLPTAAELFVLPYQDGTRENKRSPEDLEQISEVLIHKLNQNLVHFELKPGVQVLVHAAHLTAAPLVDLTPTHSGSAMLMLLSVVFVGLAVFVIYKFKRCVFLLLPSYPRPPPPSSFCQVQKQ

SEQ ID NO: 30 - protein, 1068 aa, Mus musculus
  MISC_FEATURE (1)..(1068): mature SorCS1c, isoform 3
SGTEPEKIEPGEGASRSRRDMLKDGGQQGLGTGARDPGKATRFRMEELRLTSTTFALTGDSAHNQAMVHWSGHNSSVILILTKLYDYNLGSITESSLWRSTDYGTTYEKLNDKVGLKTILSYLYVCPTNKCKIMLLTDPEIESSLLISSDEGATYQKYRLNFYLQSLLFHPKQEDWILAYSQDQKLYSSAEFGRRWQLIQESVVPNRFYWSVMGSSKEPDLVHLEARTVDGHSIYLTCRMQNCTEANRNKPFPGYIDPDSLIVQDDYVFVQLTSGGRPHYYVSYRRSPFAQMKLPKYALPKDMHVISTDENQVFAAVQEWNQNDTYNLYISDTRGVYFTLALENVRSSRGPEGNVMIDLYEVAGIKGMFLANKKIDNQVKTFITYNKGRDWRLLQAPDADLRGDPVHCLLPYCSLHLHLKVSENPYTSGIIASRDTAPSIIVASGNIGSELSDSDISMFVSSDAGNTWRQIFEEEHSILYLDQGGVLVAMKHTSLPIRHLWLSFDEGRSWSKYSFTSIPLFVDGVLGEPGEETLIMTVFGHFSHRSEWQLVKVDYKSIFDRRCAEEDYRPWQLHSQGEACIMGAKRIYKKRKSERKCMQKYAGAMESEPCVCTEADFDCDYGYERHSNGQCLPAFWFNPSSLSKDCSLGQSYLNSAGYRKVVSNNCTDGVREQYTAKPQKCPGKAPRGLRIVTADGKLTAEQGHNVTLMVQLEEGDVQRTLIQVDFGDGIAVSYVNLSSMEDGIKHVYQNVGIFRVTVQVDNSLGSDSAVLYLHVTCPLEHVHLSLPFVTTKNKEVNATAVLWPSQVGTLTYVWWYGNNTEPLITLEGSISFKFTSEGMNTITVQVSAGNAILQDTKTIAVYEEFRSLRLAFSPNLDDYNPDIPEWRRDISRVIKKSLVEATGIPSQHILVAVLPGLPTAAELFVLPYQDGTRENKRSPEDLEQISEVLIHKLNQNLVHFELKPGVQVLVHAAHLTAAPLVDLTPTHSGSAMLMLLSVVFVGLAVFVIYKFKRKIPGINVYAQMQNEKEQELINPVSHSESRPSVPHPDLRRPGQLVDEKVESQLLGK

SEQ ID NO: 31 - protein, 1068 aa, Mus musculus
  MISC_FEATURE (1)..(1068): mature SorCS1c+, isoform 4
SGTEPEKIEPGEGASRSRRDMLKDGGQQGLGTGARDPGKATRFRMEELRLTSTTFALTGDSAHNQAMVHWSGHNSSVILILTKLYDYNLGSITESSLWRSTDYGTTYEKLNDKVGLKTILSYLYVCPTNKCKIMLLTDPEIESSLLISSDEGATYQKYRLNFYLQSLLFHPKQEDWILAYSQDQKLYSSAEFGRRWQLIQESVVPNRFYWSVMGSSKEPDLVHLEARTVDGHSIYLTCRMQNCTEANRNKPFPGYIDPDSLIVQDDYVFVQLTSGGRPHYYVSYRRSPFAQMKLPKYALPKDMHVISTDENQVFAAVQEWNQNDTYNLYISDTRGVYFTLALENVRSSRGPEGNVMIDLYEVAGIKGMFLANKKIDNQVKTFITYNKGRDWRLLQAPDADLRGDPVHCLLPYCSLHLHLKVSENPYTSGIIASRDTAPSIIVASGNIGSELSDSDISMFVSSDAGNTWRQIFEEEHSILYLDQGGVLVAMKHTSLPIRHLWLSFDEGRSWSKYSFTSIPLFVDGVLGEPGEETLIMTVFGHFSHRSEWQLVKVDYKSIFDRRCAEEDYRPWQLHSQGEACIMGAKRIYKKRKSERKCMQKYAGAMESEPCVCTEADFDCDYGYERHSNGQCLPAFWFNPSSLSKDCSLGQSYLNSAGYRKVVSNNCTDGVREQYTAKPQKCPGKAPRGLRIVTADGKLTAEQGHNVTLMVQLEEGDVQRTLIQVDFGDGIAVSYVNLSSMEDGIKHVYQNVGIFRVTVQVDNSLGSDSAVLYLHVTCPLEHVHLSLPFVTTKNKEVNATAVLWPSQVGTLTYVWWYGNNTEPLITLEGSISFKFTSEGMNTITVQVSAGNAILQDTKTIAVYEEFRSLRLAFSPNLDDYNPDIPEWRRDISRVIKKSLVEATGIPSQHILVAVLPGLPTAAELFVLPYQDGTRENKRSPEDLEQISEVLIHKLNQNLVHFELKPGVQVLVHAAHLTAAPLVDLTPTHSGSAMLMLLSVVFVGLAVFVIYKFKRKIPGINVYAQMQNEKEQELINPVSHSESRSSVPHPDLRRPGQLVDEKVESQLLGE

SEQ ID NO: 32 - protein, 1081 aa, Mus musculus
  MISC_FEATURE (1)..(1081): mature SorCS1d
SGTEPEKIEPGEGASRSRRDMLKDGGQQGLGTGARDPGKATRFRMEELRLTSTTFALTGDSAHNQAMVHWSGHNSSVILILTKLYDYNLGSITESSLWRSTDYGTTYEKLNDKVGLKTILSYLYVCPTNKCKIMLLTDPEIESSLLISSDEGATYQKYRLNFYLQSLLFHPKQEDWILAYSQDQKLYSSAEFGRRWQLIQESVVPNRFYWSVMGSSKEPDLVHLEARTVDGHSIYLTCRMQNCTEANRNKPFPGYIDPDSLIVQDDYVFVQLTSGGRPHYYVSYRRSPFAQMKLPKYALPKDMHVISTDENQVFAAVQEWNQNDTYNLYISDTRGVYFTLALENVRSSRGPEGNVMIDLYEVAGIKGMFLANKKIDNQVKTFITYNKGRDWRLLQAPDADLRGDPVHCLLPYCSLHLHLKVSENPYTSGIIASRDTAPSIIVASGNIGSELSDSDISMFVSSDAGNTWRQIFEEEHSILYLDQGGVLVAMKHTSLPIRHLWLSFDEGRSWSKYSFTSIPLFVDGVLGEPGEETLIMTVFGHFSHRSEWQLVKVDYKSIFDRRCAEEDYRPWQLHSQGEACIMGAKRIYKKRKSERKCMQKYAGAMESEPCVCTEADFDCDYGYERHSNGQCLPAFWFNPSSLSKDCSLGQSYLNSAGYRKVVSNNCTDGVREQYTAKPQKCPGKAPRGLRIVTADGKLTAEQGHNVTLMVQLEEGDVQRTLIQVDFGDGIAVSYVNLSSMEDGIKHVYQNVGIFRVTVQVDNSLGSDSAVLYLHVTCPLEHVHLSLPFVTTKNKEVNATAVLWPSQVGTLTYVWWYGNNTEPLITLEGSISFKFTSEGMNTITVQVSAGNAILQDTKTIAVYEEFRSLRLAFSPNLDDYNPDIPEWRRDISRVIKKSLVEATGIPSQHILVAVLPGLPTAAELFVLPYQDGTRENKRSPEDLEQISEVLIHKLNQNLVHFELKPGVQVLVHAAHLTAAPLVDLTPTHSGSAMLMLLSVVFVGLAVFVIYKFKRGWRDRSAVKNIGCSCRGPGFNSQHQQGGSQASVTSVPRDPSPSSDLHGHQEHTWCTDIHPGKTPIHIK

SEQ ID NO: 33 - protein, 989 aa, Mus musculus
  MISC_FEATURE (1)..(989): Soluble mature SorCS1
SGTEPEKIEPGEGASRSRRDMLKDGGQQGLGTGARDPGKATRFRMEELRLTSTTFALTGDSAHNQAMVHWSGHNSSVILILTKLYDYNLGSITESSLWRSTDYGTTYEKLNDKVGLKTILSYLYVCPTNKCKIMLLTDPEIESSLLISSDEGATYQKYRLNFYLQSLLFHPKQEDWILAYSQDQKLYSSAEFGRRWQLIQESVVPNRFYWSVMGSSKEPDLVHLEARTVDGHSIYLTCRMQNCTEANRNKPFPGYIDPDSLIVQDDYVFVQLTSGGRPHYYVSYRRSPFAQMKLPKYALPKDMHVISTDENQVFAAVQEWNQNDTYNLYISDTRGVYFTLALENVRSSRGPEGNVMIDLYEVAGIKGMFLANKKIDNQVKTFITYNKGRDWRLLQAPDADLRGDPVHCLLPYCSLHLHLKVSENPYTSGIIASRDTAPSIIVASGNIGSELSDSDISMFVSSDAGNTWRQIFEEEHSILYLDQGGVLVAMKHTSLPIRHLWLSFDEGRSWSKYSFTSIPLFVDGVLGEPGEETLIMTVFGHFSHRSEWQLVKVDYKSIFDRRCAEEDYRPWQLHSQGEACIMGAKRIYKKRKSERKCMQKYAGAMESEPCVCTEADFDCDYGYERHSNGQCLPAFWFNPSSLSKDCSLGQSYLNSAGYRKVVSNNCTDGVREQYTAKPQKCPGKAPRGLRIVTADGKLTAEQGHNVTLMVQLEEGDVQRTLIQVDFGDGIAVSYVNLSSMEDGIKHVYQNVGIFRVTVQVDNSLGSDSAVLYLHVTCPLEHVHLSLPFVTTKNKEVNATAVLWPSQVGTLTYVWWYGNNTEPLITLEGSISFKFTSEGMNTITVQVSAGNAILQDTKTIAVYEEFRSLRLAFSPNLDDYNPDIPEWRRDISRVIKKSLVEATGIPSQHILVAVLPGLPTAAELFVLPYQDGTRENKRSPEDLEQISEVLIHKLNQNLVHFELKPGVQVLVHAAHLTAAPLVDLTPTHSG

SEQ ID NO: 34 - protein, 1361 aa, Pan troglodytes
  MISC_FEATURE (1)..(1361): preproSorCS1
MTGRFPPRNRKLPTHRPLREPGVDRPRGQGARTQRWDPRPRGRRVGGGERRGEAAAAPARPRGSRRRRLQRPETRARARSASDFSSAPPPRGGGSLRPDPRSAQAQPGRAAATCPAPPPPAPTAAQLGWSWGPERRPPTAASAELRAATFVLGPLSPLLFAPAMGKVGAGGGSQARLSALLAGAGLLVLCAPGVCGGGSCCPPPHPSSAPRSASTPRGFSHQGRPGRAPATPLPLVVRPLFSVAPGDRALSLERARGTGASMAVAARSGRRRRSGADQEKAERGEGASRSPRGVLRDGGQQEPGTLERDPDKATRFRMEELRLTSTTFALTGDSAHNQAMVHWSGHNSSVILILTKLYDYNLGSITESSLWRSTDYGTTYEKLNDKVGLKTILSYLYVCPTNKRKIMLLTDPEIESSLLISSDEGATYQKYRLNFYIQSLLFHPKQEDWILAYSQDQKLYSSAEFGRRWQLIQEGVVPNRFYWSVMGSNKEPDLVHLEARTVDGHSHYLTCRMQNCTEANRNQPFPGYIDPDSLIVQDHYVFVQLTSGGRPHYYVSYRRNAFAQMKLPKYALPKDMHVISTDENQVFAAVQEWNQNDTYNLYISDTRGVYFTLALENVQSSRGPEGNIMIDLYEVAGIKGMFLANKKIDNQVKTFITYNKGRDWRLLQAPDTDLRGDPVHCLLPYCSLHLHLKVSENPYTSGIIASKDTAPSIIVASGNIGSELSDTDISMFVSSDAGNTWRQIFEEEHSVLYLDQGGVLVAMKHTSLPIRHLWLSFDEGRSWSKYSFTSIPLFVDGVLGEPGEETLIMTVFGHFSHRSEWQLVKVDYKSIFDRRCAEEDYRPWQLHSQGEACIMGAKRIYKKRKSERKCMQGKYAGAMESEPCVCTEADFDCDYGYERHSNGQCLPAFWFNPSSLSKDCSLGQSYLNSTGYRKVVSNNCTDGVREQYTAKPQKCPGKAPRGLRIVTADGKLTAEQGHNVTLMVQLEEGDVQRTLIQVDFGDGIAVSYVNLSSMEDGIKHVYQNVGIFRVTVQVDNSLGSDSAVLYLHVTCPLEHVHLSLPFVTTKNKEVNATAVLWPSQVGTLTYVWWYGNNTEPLITLEGSISFRFTSEGMNTITVQVSAGNAILQDTKTIAVYEEFRSLRLSFSPNLDDYNPDIPEWRRDIGRVIKKSLVEATGVPGQHILVAVLPGLPTTAELFVLPYQDPAGENKRSTDDLEQISELLIHTLNQNSVHFELKPGVRVLVHAAHLTAAPLVDLTPTHSGSAMLMLLSVVFVGLAVFVIYKFKRKIPGINVYAQMQNEKEQEMISPVSHFESRPSVPQTELRRPGQLIDEKVESQLIGSISIVAENQSTKEIPTYVNV

SEQ ID NO: 35 - protein, 1165 aa, Pan troglodytes
  MISC_FEATURE (1)..(1165): proSorCS1
GGSCCPPPHPSSAPRSASTPRGFSHQGRPGRAPATPLPLVVRPLFSVAPGDRALSLERARGTGASMAVAARSGRRRRSGADQEKAERGEGASRSPRGVLRDGGQQEPGTLERDPDKATRFRMEELRLTSTTFALTGDSAHNQAMVHWSGHNSSVILILTKLYDYNLGSITESSLWRSTDYGTTYEKLNDKVGLKTILSYLYVCPTNKRKIMLLTDPEIESSLLISSDEGATYQKYRLNFYIQSLLFHPKQEDWILAYSQDQKLYSSAEFGRRWQLIQEGVVPNRFYWSVMGSNKEPDLVHLEARTVDGHSHYLTCRMQNCTEANRNQPFPGYIDPDSLIVQDHYVFVQLTSGGRPHYYVSYRRNAFAQMKLPKYALPKDMHVISTDENQVFAAVQEWNQNDTYNLYISDTRGVYFTLALENVQSSRGPEGNIMIDLYEVAGIKGMFLANKKIDNQVKTFITYNKGRDWRLLQAPDTDLRGDPVHCLLPYCSLHLHLKVSENPYTSGIIASKDTAPSIIVASGNIGSELSDTDISMFVSSDAGNTWRQIFEEEHSVLYLDQGGVLVAMKHTSLPIRHLWLSFDEGRSWSKYSFTSIPLFVDGVLGEPGEETLIMTVFGHFSHRSEWQLVKVDYKSIFDRRCAEEDYRPWQLHSQGEACIMGAKRIYKKRKSERKCMQGKYAGAMESEPCVCTEADFDCDYGYERHSNGQCLPAFWFNPSSLSKDCSLGQSYLNSTGYRKVVSNNCTDGVREQYTAKPQKCPGKAPRGLRIVTADGKLTAEQGHNVTLMVQLEEGDVQRTLIQVDFGDGIAVSYVNLSSMEDGIKHVYQNVGIFRVTVQVDNSLGSDSAVLYLHVTCPLEHVHLSLPFVTTKNKEVNATAVLWPSQVGTLTYVWWYGNNTEPLITLEGSISFRFTSEGMNTITVQVSAGNAILQDTKTIAVYEEFRSLRLSFSPNLDDYNPDIPEWRRDIGRVIKKSLVEATGVPGQHILVAVLPGLPTTAELFVLPYQDPAGENKRSTDDLEQISELLIHTLNQNSVHFELKPGVRVLVHAAHLTAAPLVDLTPTHSGSAMLMLLSVVFVGLAVFVIYKFKRKIPGINVYAQMQNEKEQEMISPVSHFESRPSVPQTELRRPGQLIDEKVESQLIGSISIVAENQSTKEIPTYVNV

SEQ ID NO: 36 - protein, 1088 aa, Pan troglodytes
  MISC_FEATURE (1)..(1088): mature SorCS1
SGADQEKAERGEGASRSPRGVLRDGGQQEPGTLERDPDKATRFRMEELRLTSTTFALTGDSAHNQAMVHWSGHNSSVILILTKLYDYNLGSITESSLWRSTDYGTTYEKLNDKVGLKTILSYLYVCPTNKRKIMLLTDPEIESSLLISSDEGATYQKYRLNFYIQSLLFHPKQEDWILAYSQDQKLYSSAEFGRRWQLIQEGVVPNRFYWSVMGSNKEPDLVHLEARTVDGHSHYLTCRMQNCTEANRNQPFPGYIDPDSLIVQDHYVFVQLTSGGRPHYYVSYRRNAFAQMKLPKYALPKDMHVISTDENQVFAAVQEWNQNDTYNLYISDTRGVYFTLALENVQSSRGPEGNIMIDLYEVAGIKGMFLANKKIDNQVKTFITYNKGRDWRLLQAPDTDLRGDPVHCLLPYCSLHLHLKVSENPYTSGIIASKDTAPSIIVASGNIGSELSDTDISMFVSSDAGNTWRQIFEEEHSVLYLDQGGVLVAMKHTSLPIRHLWLSFDEGRSWSKYSFTSIPLFVDGVLGEPGEETLIMTVFGHFSHRSEWQLVKVDYKSIFDRRCAEEDYRPWQLHSQGEACIMGAKRIYKKRKSERKCMQGKYAGAMESEPCVCTEADFDCDYGYERHSNGQCLPAFWFNPSSLSKDCSLGQSYLNSTGYRKVVSNNCTDGVREQYTAKPQKCPGKAPRGLRIVTADGKLTAEQGHNVTLMVQLEEGDVQRTLIQVDFGDGIAVSYVNLSSMEDGIKHVYQNVGIFRVTVQVDNSLGSDSAVLYLHVTCPLEHVHLSLPFVTTKNKEVNATAVLWPSQVGTLTYVWWYGNNTEPLITLEGSISFRFTSEGMNTITVQVSAGNAILQDTKTIAVYEEFRSLRLSFSPNLDDYNPDIPEWRRDIGRVIKKSLVEATGVPGQHILVAVLPGLPTTAELFVLPYQDPAGENKRSTDDLEQISELLIHTLNQNSVHFELKPGVRVLVHAAHLTAAPLVDLTPTHSGSAMLMLLSVVFVGLAVFVIYKFKRKIPGINVYAQMQNEKEQEMISPVSHFESRPSVPQTELRRPGQLIDEKVESQLIGSISIVAENQSTKEIPTYVNV

SEQ ID NO: 37 - protein, 990 aa, Pan troglodytes
  MISC_FEATURE (1)..(990): soluble SorCS1
SGADQEKAERGEGASRSPRGVLRDGGQQEPGTLERDPDKATRFRMEELRLTSTTFALTGDSAHNQAMVHWSGHNSSVILILTKLYDYNLGSITESSLWRSTDYGTTYEKLNDKVGLKTILSYLYVCPTNKRKIMLLTDPEIESSLLISSDEGATYQKYRLNFYIQSLLFHPKQEDWILAYSQDQKLYSSAEFGRRWQLIQEGVVPNRFYWSVMGSNKEPDLVHLEARTVDGHSHYLTCRMQNCTEANRNQPFPGYIDPDSLIVQDHYVFVQLTSGGRPHYYVSYRRNAFAQMKLPKYALPKDMHVISTDENQVFAAVQEWNQNDTYNLYISDTRGVYFTLALENVQSSRGPEGNIMIDLYEVAGIKGMFLANKKIDNQVKTFITYNKGRDWRLLQAPDTDLRGDPVHCLLPYCSLHLHLKVSENPYTSGIIASKDTAPSIIVASGNIGSELSDTDISMFVSSDAGNTWRQIFEEEHSVLYLDQGGVLVAMKHTSLPIRHLWLSFDEGRSWSKYSFTSIPLFVDGVLGEPGEETLIMTVFGHFSHRSEWQLVKVDYKSIFDRRCAEEDYRPWQLHSQGEACIMGAKRIYKKRKSERKCMQGKYAGAMESEPCVCTEADFDCDYGYERHSNGQCLPAFWFNPSSLSKDCSLGQSYLNSTGYRKVVSNNCTDGVREQYTAKPQKCPGKAPRGLRIVTADGKLTAEQGHNVTLMVQLEEGDVQRTLIQVDFGDGIAVSYVNLSSMEDGIKHVYQNVGIFRVTVQVDNSLGSDSAVLYLHVTCPLEHVHLSLPFVTTKNKEVNATAVLWPSQVGTLTYVWWYGNNTEPLITLEGSISFRFTSEGMNTITVQVSAGNAILQDTKTIAVYEEFRSLRLSFSPNLDDYNPDIPEWRRDIGRVIKKSLVEATGVPGQHILVAVLPGLPTTAELFVLPYQDPAGENKRSTDDLEQISELLIHTLNQNSVHFELKPGVRVLVHAAHLTAAPLVDLTPTHSG

SEQ ID NO: 38 - protein, 997 aa, Canis lupus familiaris
  MISC_FEATURE (1)..(997): mature SorCS1
MRKVSEIMVLRSWHSVILILTKLYDYNLGSITESSLWRSTDYGTTYEKLNDKVGLKTILSYLYVCPTNKRKIMLLTDPEIESSLLISSDEGATYQKYRLNFYIQSLLFHPKQEDWILAYSQDQKLYSSAEFGRRWQLIQEGVVPNRFYWSVMGSNKEPDLVHLEARTVDGHSQYLTCRMQNCTEANRNKPFPGYIDPDSLIVQDDYVFVQLTSGGRPHYYVSYRRNAFAQMKLPKYALPKDMHVISTDENQVFAAVQEWNQNDTYNLYISDTRGVYFTLALENVQSSRGPEGNIMIDLYEVAGIKGMFLANKKIDNQVKTFITYNKGRDWRLLQAPDTDLRGDPVHCLLPYCSLHLHLKVSENPYTSGIIASRDTAPSIIVASGNIGSELSDSDISMFVSSDAGNTWRQIFEEEHSVLYLDQGGVLVAMKHTSLPIRHLWLSFDEGRSWSKYSFTSIPLFVDGVLGEPGEETLIMTVFGHFSHRSEWQLVKVDYKSIFDRRCAEEDYRPWQLHSQGEACIMGAKRIYKKRKSERKCMQGKYAGAMESEPCVCTEADFDCDYGYERHSNGQCLPAFWFNPSSLSKDCSLGQSYLNSTGYRKVVSNNCTDGVREQYTAKPQKCPGKAPRGLRIVTADGKLTAEQGHNVTLMVQLEEGDVQRTLIQVDFGDGIAVSYVNLSSMEDGIKHVYHNVGIFRVTVQVDNSLGSDSAVLYLHVTCPLEHVHLSLPFVTTKNKEVNATAVLWPSQVGTLTYVWWYGNNTEPLITLEGSISFKFTSEGMNTITVQVSAGNAILQDTKTIAVYEEFRSLRLSFSPNLDDYNPDIPEWRRDISRVIKKSLVEATGVPGQHILVAVLPGLPTAAELFVLPYQDPTGENKRSAEDLEQISELLIHKLNQNSVHFELKPGVQILVHAAHLTAAPLVDLTPTHSGSAMLMLLSVVFVGLAVFVIYKFKRRVALPSPPSPSTQPGDSSLRLQRARHATPPSTPKRGSAGAQFAI

SEQ ID NO: 39 - protein, 929 aa, Canis lupus familiaris
  MISC_FEATURE (1)..(929): soluble SorCS1
MRKVSEIMVLRSWHSVILILTKLYDYNLGSITESSLWRSTDYGTTYEKLNDKVGLKTILSYLYVCPTNKRKIMLLTDPEIESSLLISSDEGATYQKYRLNFYIQSLLFHPKQEDWILAYSQDQKLYSSAEFGRRWQLIQEGVVPNRFYWSVMGSNKEPDLVHLEARTVDGHSQYLTCRMQNCTEANRNKPFPGYIDPDSLIVQDDYVFVQLTSGGRPHYYVSYRRNAFAQMKLPKYALPKDMHVISTDENQVFAAVQEWNQNDTYNLYISDTRGVYFTLALENVQSSRGPEGNIMIDLYEVAGIKGMFLANKKIDNQVKTFITYNKGRDWRLLQAPDTDLRGDPVHCLLPYCSLHLHLKVSENPYTSGIIASRDTAPSIIVASGNIGSELSDSDISMFVSSDAGNTWRQIFEEEHSVLYLDQGGVLVAMKHTSLPIRHLWLSFDEGRSWSKYSFTSIPLFVDGVLGEPGEETLIMTVFGHFSHRSEWQLVKVDYKSIFDRRCAEEDYRPWQLHSQGEACIMGAKRIYKKRKSERKCMQGKYAGAMESEPCVCTEADFDCDYGYERHSNGQCLPAFWFNPSSLSKDCSLGQSYLNSTGYRKVVSNNCTDGVREQYTAKPQKCPGKAPRGLRIVTADGKLTAEQGHNVTLMVQLEEGDVQRTLIQVDFGDGIAVSYVNLSSMEDGIKHVYHNVGIFRVTVQVDNSLGSDSAVLYLHVTCPLEHVHLSLPFVTTKNKEVNATAVLWPSQVGTLTYVWWYGNNTEPLITLEGSISFKFTSEGMNTITVQVSAGNAILQDTKTIAVYEEFRSLRLSFSPNLDDYNPDIPEWRRDISRVIKKSLVEATGVPGQHILVAVLPGLPTAAELFVLPYQDPTGENKRSAEDLEQISELLIHKLNQNSVHFELKPGVQILVHAAHLTAAPLVDLTPTHSG

SEQ ID NO: 40 - protein, 1196 aa, Bos taurus
  MISC_FEATURE (1)..(1196): preproSorCS1
MGKVGAGGVSPAGLSALLAGAGLLVLCAPGSCGGGSCCPPRHPSAAPRWAPTPGGLPHQGPRGRAPATPLPQLGRPLFAVAPGDRALSLERAPGTGASVAVAPRSGRKRRSGEDQEKAERGEGTSRSPRGVLRDRGQLEPGTLERDPDKATRFRLEELKLTSTTFALTGDSAHNQAMVHWSGHNSSVILILTKLFDYNLGSITESSLWRSTDYGTTYEKLNDKVGLKTILSYLYVCPTNKRKIMLLTDPEIESSLLISSDEGATYQKYRLNFYIQSLLFHPKQEDWILAYSQDQKLYSSAEFGRRWQLIQEAVVPNRFYWSVMGSNKEPDLVHLEARTVDGHSQYLTCRMQNCTEANRNKPFPGYIDPDSLIVQDDYVFVQLTSGGRPHYYVSYRRNAFAQMKLPKYALPKDMHVISTDENQVFAAVQEWNQNDTYNLYISDTRGVYFTLALENVQSSRGPEGNVMIDLYEVAGIKGMFLANKKIDNQVKTFITYNKGRDWRLLQAPDTDLRGDPVHCVLPYCSLHLHLKVSENPYTSGIIASRDTAPSIIVASGNIGSELSDSDISMFVSSDAGNTWRQIFEEEHSVLYLDQGGVLVAMKHTSLPIRHLWLSFDEGRSWSKYSFTSIPLFVDGVLGEPGEETLIMTLLDHSHSDWLVTALQPCCLFLLGNEWEDKIAWKPQDQGEACIMGAKRIYKKRKSERKCMQGKYAGAMESEPCVCTEADFDCDYGYERHSNGQCLPAFWFNPSSLSKDCSLGQSYLNSTGYRKVVSNNCTDGVREQYTAKPQKCPGKAPRGLRIVTADGKLTAEQGHNVTLMVQLEEGDVQRTLIQVDFGDGIAVSYVNLSSMEDGIKHVYHNVGIFRVTVQVDNSLGSDSAVLYLHVTCPLEHVHLSLPFVTTKNKEVNATAVLWPSQVGTLTYVWWYGNNTEPLITLEGSIAFKFTSEGMNTITVQVSAGNAILQDTKTIAVYEEFRSLRLSFSPNLDDYNPDIPEWRRDVSRVIKKALVEATGVPGQHILVAVLPGLPTAAELFVLPHQDPTGENKRPAEDLEQISELMIHKLNQNSVHFELKPGVQVLVHAAHLTAAPLVDLTPTHSGSAMLMLLSVVFVGLAVFVIYKFKRKIPGINVYAQMQNEKEQEMVSRVSHPESRPYVPQTELRRPGQLIDEKVESQLIGSISIVAENQSTKEIPTYVNV

SEQ ID NO: 41 - protein, 1163 aa, Bos taurus
  MISC_FEATURE (1)..(1163): proSorCS1
GGSCCPPRHPSAAPRWAPTPGGLPHQGPRGRAPATPLPQLGRPLFAVAPGDRALSLERAPGTGASVAVAPRSGRKRRSGEDQEKAERGEGTSRSPRGVLRDRGQLEPGTLERDPDKATRFRLEELKLTSTTFALTGDSAHNQAMVHWSGHNSSVILILTKLFDYNLGSITESSLWRSTDYGTTYEKLNDKVGLKTILSYLYVCPTNKRKIMLLTDPEIESSLLISSDEGATYQKYRLNFYIQSLLFHPKQEDWILAYSQDQKLYSSAEFGRRWQLIQEAVVPNRFYWSVMGSNKEPDLVHLEARTVDGHSQYLTCRMQNCTEANRNKPFPGYIDPDSLIVQDDYVFVQLTSGGRPHYYVSYRRNAFAQMKLPKYALPKDMHVISTDENQVFAAVQEWNQNDTYNLYISDTRGVYFTLALENVQSSRGPEGNVMIDLYEVAGIKGMFLANKKIDNQVKTFITYNKGRDWRLLQAPDTDLRGDPVHCVLPYCSLHLHLKVSENPYTSGIIASRDTAPSIIVASGNIGSELSDSDISMFVSSDAGNTWRQIFEEEHSVLYLDQGGVLVAMKHTSLPIRHLWLSFDEGRSWSKYSFTSIPLFVDGVLGEPGEETLIMTLLDHSHSDWLVTALQPCCLFLLGNEWEDKIAWKPQDQGEACIMGAKRIYKKRKSERKCMQGKYAGAMESEPCVCTEADFDCDYGYERHSNGQCLPAFWFNPSSLSKDCSLGQSYLNSTGYRKVVSNNCTDGVREQYTAKPQKCPGKAPRGLRIVTADGKLTAEQGHNVTLMVQLEEGDVQRTLIQVDFGDGIAVSYVNLSSMEDGIKHVYHNVGIFRVTVQVDNSLGSDSAVLYLHVTCPLEHVHLSLPFVTTKNKEVNATAVLWPSQVGTLTYVWWYGNNTEPLITLEGSIAFKFTSEGMNTITVQVSAGNAILQDTKTIAVYEEFRSLRLSFSPNLDDYNPDIPEWRRDVSRVIKKALVEATGVPGQHILVAVLPGLPTAAELFVLPHQDPTGENKRPAEDLEQISELMIHKLNQNSVHFELKPGVQVLVHAAHLTAAPLVDLTPTHSGSAMLMLLSVVFVGLAVFVIYKFKRKIPGINVYAQMQNEKEQEMVSRVSHPESRPYVPQTELRRPGQLIDEKVESQLIGSISIVAENQSTKEIPTYVNV

SEQ ID NO: 42 - protein, 1086 aa, Bos taurus
  MISC_FEATURE (1)..(1086): mature SorCS1
SGEDQEKAERGEGTSRSPRGVLRDRGQLEPGTLERDPDKATRFRLEELKLTSTTFALTGDSAHNQAMVHWSGHNSSVILILTKLFDYNLGSITESSLWRSTDYGTTYEKLNDKVGLKTILSYLYVCPTNKRKIMLLTDPEIESSLLISSDEGATYQKYRLNFYIQSLLFHPKQEDWILAYSQDQKLYSSAEFGRRWQLIQEAVVPNRFYWSVMGSNKEPDLVHLEARTVDGHSQYLTCRMQNCTEANRNKPFPGYIDPDSLIVQDDYVFVQLTSGGRPHYYVSYRRNAFAQMKLPKYALPKDMHVISTDENQVFAAVQEWNQNDTYNLYISDTRGVYFTLALENVQSSRGPEGNVMIDLYEVAGIKGMFLANKKIDNQVKTFITYNKGRDWRLLQAPDTDLRGDPVHCVLPYCSLHLHLKVSENPYTSGIIASRDTAPSIIVASGNIGSELSDSDISMFVSSDAGNTWRQIFEEEHSVLYLDQGGVLVAMKHTSLPIRHLWLSFDEGRSWSKYSFTSIPLFVDGVLGEPGEETLIMTLLDHSHSDWLVTALQPCCLFLLGNEWEDKIAWKPQDQGEACIMGAKRIYKKRKSERKCMQGKYAGAMESEPCVCTEADFDCDYGYERHSNGQCLPAFWFNPSSLSKDCSLGQSYLNSTGYRKVVSNNCTDGVREQYTAKPQKCPGKAPRGLRIVTADGKLTAEQGHNVTLMVQLEEGDVQRTLIQVDFGDGIAVSYVNLSSMEDGIKHVYHNVGIFRVTVQVDNSLGSDSAVLYLHVTCPLEHVHLSLPFVTTKNKEVNATAVLWPSQVGTLTYVWWYGNNTEPLITLEGSIAFKFTSEGMNTITVQVSAGNAILQDTKTIAVYEEFRSLRLSFSPNLDDYNPDIPEWRRDVSRVIKKALVEATGVPGQHILVAVLPGLPTAAELFVLPHQDPTGENKRPAEDLEQISELMIHKLNQNSVHFELKPGVQVLVHAAHLTAAPLVDLTPTHSGSAMLMLLSVVFVGLAVFVIYKFKRKIPGINVYAQMQNEKEQEMVSRVSHPESRPYVPQTELRRPGQLIDEKVESQLIGSISIVAENQSTKEIPTYVNV

SEQ ID NO: 43 - protein, 988 aa, Bos taurus
  MISC_FEATURE (1)..(988): soluble SorCS1
SGEDQEKAERGEGTSRSPRGVLRDRGQLEPGTLERDPDKATRFRLEELKLTSTTFALTGDSAHNQAMVHWSGHNSSVILILTKLFDYNLGSITESSLWRSTDYGTTYEKLNDKVGLKTILSYLYVCPTNKRKIMLLTDPEIESSLLISSDEGATYQKYRLNFYIQSLLFHPKQEDWILAYSQDQKLYSSAEFGRRWQLIQEAVVPNRFYWSVMGSNKEPDLVHLEARTVDGHSQYLTCRMQNCTEANRNKPFPGYIDPDSLIVQDDYVFVQLTSGGRPHYYVSYRRNAFAQMKLPKYALPKDMHVISTDENQVFAAVQEWNQNDTYNLYISDTRGVYFTLALENVQSSRGPEGNVMIDLYEVAGIKGMFLANKKIDNQVKTFITYNKGRDWRLLQAPDTDLRGDPVHCVLPYCSLHLHLKVSENPYTSGIIASRDTAPSIIVASGNIGSELSDSDISMFVSSDAGNTWRQIFEEEHSVLYLDQGGVLVAMKHTSLPIRHLWLSFDEGRSWSKYSFTSIPLFVDGVLGEPGEETLIMTLLDHSHSDWLVTALQPCCLFLLGNEWEDKIAWKPQDQGEACIMGAKRIYKKRKSERKCMQGKYAGAMESEPCVCTEADFDCDYGYERHSNGQCLPAFWFNPSSLSKDCSLGQSYLNSTGYRKVVSNNCTDGVREQYTAKPQKCPGKAPRGLRIVTADGKLTAEQGHNVTLMVQLEEGDVQRTLIQVDFGDGIAVSYVNLSSMEDGIKHVYHNVGIFRVTVQVDNSLGSDSAVLYLHVTCPLEHVHLSLPFVTTKNKEVNATAVLWPSQVGTLTYVWWYGNNTEPLITLEGSIAFKFTSEGMNTITVQVSAGNAILQDTKTIAVYEEFRSLRLSFSPNLDDYNPDIPEWRRDVSRVIKKALVEATGVPGQHILVAVLPGLPTAAELFVLPHQDPTGENKRPAEDLEQISELMIHKLNQNSVHFELKPGVQVLVHAAHLTAAPLVDLTPTHSG

SEQ ID NO: 44 - protein, 1369 aa, Rattus norvegicus
  MISC_FEATURE (1)..(1369): preproSorCS1
MRAQVFLQQSGLSEKKHTDGIPTVPSINVIPERSKELLVPRGRVLWLLAGTLRSLGRVGDSTARARLPVHSAARRRDAAPGALAEPALPPASPRRRRRRWLAAPSQPARSSQAQPGRAAGTCPAPPPRAPPPPNLDGVVVLSAHPAAVSPVPRSAACLRFGTPSPLLSAPEMGKVGAGDGSSAALSALLTGAGLLMLLAPGICSSLSCCPPQHPSSTPRWTLTPRGFSYPGPLGRAPATPPPLFMRPLFAVAPGDRALFLERAGGSRVSVATASRSGRRRRSGMDPEKTEPGEGTSRSRRDMLRDGGQQGPGTGARDPDKATRFRMEELRLTSTTFALTGDSAHNQAMVHWSGHNSSVILILTKLYDYNLGSITESSLWRSTDYGTTYEKLNDKVGLKTILSYLYVCPTNKRKIMLLTDPEIESSLLISSDEGATYQKYRLNFYIQSLLFHPKQEDWILAYSQDQKLYSSAEFGRRWQLIQEAVVPNRFYWSVLGSNKEPDLVHLEARTVDGHSIYLTCRMQNCTEANRNKPFPGYIDPDSLIVQDDYVFVQLTSGGRPHYYVSYRRNPFAQMKLPKYALPKDMHVISTDENQVFAAVQEWNQNDTYNLYISDTRGVYFTLALENVQSSRGPEGNVMIDLYEVAGIKGMFLANKKIDNQVKTFITYNKGRDWRLLQAPDADLRGDPVHCLLPYCSLHLHLKVSENPYTSGIIASRDTAPSIIVASGNIGSELSDSDISMFVSSDAGNTWRQIFEEEHSILYLDQGGVLVAMKHTSLPIRHLWLSFDEGRSWSKYSFTSIPLFVDGVLGEPGEETLIMTVFGHFSHRSEWQLVKVDYKSIFDRRCAEEDYRPWQLHSQGEACIMGAKRIYKKRKSERKCMQGTYAGAMESEPCVCTEADFDCDYGYERHSSGQCLPAFWFNPSSLSKDCSLGQSYLNSTGYRKVVSNNCTDGVREQYTAKPQKCPGKAPRGLRIVTADGKLTAEQGHNVTLMVQLEEGDVQRTLIQVDFGDGIAVSYVNLSSMEDGIKHVYQNVGIFRVTVQVDNSLGSDSAVLYLHVTCPLEHVHLSLPFVTTKNKEVNATAVLWPSQVGTLTYVWWYGNNTEPLITLEGSISFKFTSEGMNTITVQVSAGNAILQDTKTIAVYEEFRSLRLAFSPNLDDYNPDIPEWRRDISRVIKKSLVEATGIPSQHILVAVLPGLPTAAELFVLPYQDGARENKRSPEDLEQISEVLIHKLNQNLVHFELKPGVQVLVHAAHLTAAPLVDLTPTHSGSAMLMLLSVVFVGLAVFVIYKFKRKIPGINVYAQMQNEKEQELINPVSHTESRPTAPHPDLRRPGQLVDEKVESHLLGSISIVAENQSTKEIPTYVNV

SEQ ID NO: 45 - protein, 1165 aa, Rattus norvegicus
  MISC_FEATURE (1)..(1165): proSorCS1
SLSCCPPQHPSSTPRWTLTPRGFSYPGPLGRAPATPPPLFMRPLFAVAPGDRALFLERAGGSRVSVATASRSGRRRRSGMDPEKTEPGEGTSRSRRDMLRDGGQQGPGTGARDPDKATRFRMEELRLTSTTFALTGDSAHNQAMVHWSGHNSSVILILTKLYDYNLGSITESSLWRSTDYGTTYEKLNDKVGLKTILSYLYVCPTNKRKIMLLTDPEIESSLLISSDEGATYQKYRLNFYIQSLLFHPKQEDWILAYSQDQKLYSSAEFGRRWQLIQEAVVPNRFYWSVLGSNKEPDLVHLEARTVDGHSIYLTCRMQNCTEANRNKPFPGYIDPDSLIVQDDYVFVQLTSGGRPHYYVSYRRNPFAQMKLPKYALPKDMHVISTDENQVFAAVQEWNQNDTYNLYISDTRGVYFTLALENVQSSRGPEGNVMIDLYEVAGIKGMFLANKKIDNQVKTFITYNKGRDWRLLQAPDADLRGDPVHCLLPYCSLHLHLKVSENPYTSGIIASRDTAPSIIVASGNIGSELSDSDISMFVSSDAGNTWRQIFEEEHSILYLDQGGVLVAMKHTSLPIRHLWLSFDEGRSWSKYSFTSIPLFVDGVLGEPGEETLIMTVFGHFSHRSEWQLVKVDYKSIFDRRCAEEDYRPWQLHSQGEACIMGAKRIYKKRKSERKCMQGTYAGAMESEPCVCTEADFDCDYGYERHSSGQCLPAFWFNPSSLSKDCSLGQSYLNSTGYRKVVSNNCTDGVREQYTAKPQKCPGKAPRGLRIVTADGKLTAEQGHNVTLMVQLEEGDVQRTLIQVDFGDGIAVSYVNLSSMEDGIKHVYQNVGIFRVTVQVDNSLGSDSAVLYLHVTCPLEHVHLSLPFVTTKNKEVNATAVLWPSQVGTLTYVWWYGNNTEPLITLEGSISFKFTSEGMNTITVQVSAGNAILQDTKTIAVYEEFRSLRLAFSPNLDDYNPDIPEWRRDISRVIKKSLVEATGIPSQHILVAVLPGLPTAAELFVLPYQDGARENKRSPEDLEQISEVLIHKLNQNLVHFELKPGVQVLVHAAHLTAAPLVDLTPTHSGSAMLMLLSVVFVGLAVFVIYKFKRKIPGINVYAQMQNEKEQELINPVSHTESRPTAPHPDLRRPGQLVDEKVESHLLGSISIVAENQSTKEIPTYVNV

SEQ ID NO: 46 - protein, 1088 aa, Rattus norvegicus
  MISC_FEATURE (1)..(1088): mature SorCS1
SGMDPEKTEPGEGTSRSRRDMLRDGGQQGPGTGARDPDKATRFRMEELRLTSTTFALTGDSAHNQAMVHWSGHNSSVILILTKLYDYNLGSITESSLWRSTDYGTTYEKLNDKVGLKTILSYLYVCPTNKRKIMLLTDPEIESSLLISSDEGATYQKYRLNFYIQSLLFHPKQEDWILAYSQDQKLYSSAEFGRRWQLIQEAVVPNRFYWSVLGSNKEPDLVHLEARTVDGHSIYLTCRMQNCTEANRNKPFPGYIDPDSLIVQDDYVFVQLTSGGRPHYYVSYRRNPFAQMKLPKYALPKDMHVISTDENQVFAAVQEWNQNDTYNLYISDTRGVYFTLALENVQSSRGPEGNVMIDLYEVAGIKGMFLANKKIDNQVKTFITYNKGRDWRLLQAPDADLRGDPVHCLLPYCSLHLHLKVSENPYTSGIIASRDTAPSIIVASGNIGSELSDSDISMFVSSDAGNTWRQIFEEEHSILYLDQGGVLVAMKHTSLPIRHLWLSFDEGRSWSKYSFTSIPLFVDGVLGEPGEETLIMTVFGHFSHRSEWQLVKVDYKSIFDRRCAEEDYRPWQLHSQGEACIMGAKRIYKKRKSERKCMQGTYAGAMESEPCVCTEADFDCDYGYERHSSGQCLPAFWFNPSSLSKDCSLGQSYLNSTGYRKVVSNNCTDGVREQYTAKPQKCPGKAPRGLRIVTADGKLTAEQGHNVTLMVQLEEGDVQRTLIQVDFGDGIAVSYVNLSSMEDGIKHVYQNVGIFRVTVQVDNSLGSDSAVLYLHVTCPLEHVHLSLPFVTTKNKEVNATAVLWPSQVGTLTYVWWYGNNTEPLITLEGSISFKFTSEGMNTITVQVSAGNAILQDTKTIAVYEEFRSLRLAFSPNLDDYNPDIPEWRRDISRVIKKSLVEATGIPSQHILVAVLPGLPTAAELFVLPYQDGARENKRSPEDLEQISEVLIHKLNQNLVHFELKPGVQVLVHAAHLTAAPLVDLTPTHSGSAMLMLLSVVFVGLAVFVIYKFKRKIPGINVYAQMQNEKEQELINPVSHTESRPTAPHPDLRRPGQLVDEKVESHLLGSISIVAENQSTKEIPTYVNV

SEQ ID NO: 47 - protein, 990 aa, Rattus norvegicus
  MISC_FEATURE (1)..(990): soluble SorCS1
SGMDPEKTEPGEGTSRSRRDMLRDGGQQGPGTGARDPDKATRFRMEELRLTSTTFALTGDSAHNQAMVHWSGHNSSVILILTKLYDYNLGSITESSLWRSTDYGTTYEKLNDKVGLKTILSYLYVCPTNKRKIMLLTDPEIESSLLISSDEGATYQKYRLNFYIQSLLFHPKQEDWILAYSQDQKLYSSAEFGRRWQLIQEAVVPNRFYWSVLGSNKEPDLVHLEARTVDGHSIYLTCRMQNCTEANRNKPFPGYIDPDSLIVQDDYVFVQLTSGGRPHYYVSYRRNPFAQMKLPKYALPKDMHVISTDENQVFAAVQEWNQNDTYNLYISDTRGVYFTLALENVQSSRGPEGNVMIDLYEVAGIKGMFLANKKIDNQVKTFITYNKGRDWRLLQAPDADLRGDPVHCLLPYCSLHLHLKVSENPYTSGIIASRDTAPSIIVASGNIGSELSDSDISMFVSSDAGNTWRQIFEEEHSILYLDQGGVLVAMKHTSLPIRHLWLSFDEGRSWSKYSFTSIPLFVDGVLGEPGEETLIMTVFGHFSHRSEWQLVKVDYKSIFDRRCAEEDYRPWQLHSQGEACIMGAKRIYKKRKSERKCMQGTYAGAMESEPCVCTEADFDCDYGYERHSSGQCLPAFWFNPSSLSKDCSLGQSYLNSTGYRKVVSNNCTDGVREQYTAKPQKCPGKAPRGLRIVTADGKLTAEQGHNVTLMVQLEEGDVQRTLIQVDFGDGIAVSYVNLSSMEDGIKHVYQNVGIFRVTVQVDNSLGSDSAVLYLHVTCPLEHVHLSLPFVTTKNKEVNATAVLWPSQVGTLTYVWWYGNNTEPLITLEGSISFKFTSEGMNTITVQVSAGNAILQDTKTIAVYEEFRSLRLAFSPNLDDYNPDIPEWRRDISRVIKKSLVEATGIPSQHILVAVLPGLPTAAELFVLPYQDGARENKRSPEDLEQISEVLIHKLNQNLVHFELKPGVQVLVHAAHLTAAPLVDLTPTHSG

SEQ ID NO: 48 - protein, 1258 aa, Gallus gallus
  MISC_FEATURE (1)..(1258): preproSorCS1
MEKVAGWYPAWHVALLYWTWLFLFTFGFTGAEITCRSCHSQVNPQQQHPQQGLPMHLKTDRGEKERWRIPGEQGGERGRGAGMDTEDAELQAPFDPALAGTKFSGWETRSWASEPEKAPGDSRPGAAAAPTGEYPQRGQAGGRRNSARRRRGRSPRGTAGPGGAAGREPGGSGAARFGLEELRLGSTTFALTGDSAHNQAMVHWSGQNSSVILILTKLYDYNLGSITESSLWRSTDYGTTYEKLNDKIGLKTILSYLYVCPTNKRKIMLLTDPEVESSLLISTDEGATYQKYRLNFYIHSLLFHPKQEDWILAYSQDQKLFSSVEFGRRWLLLHEGVAPNRFYWSMMVSGREPDLVHLEAKTVDGHAQYITCKMQNCSEASQNKPFPGYIDHNSLIVQDDYVFVQLTSGGRPHYYVSYRRNAFTPIKLPKYSLPKDMHVISTDESQVFAAVQEWNQNDTYNLYISDTRGVYFTLALENVKSSQGLDGNVMIDLYEVAGIKGMFLANKKIDNQVKTFITYNKGRDWNLLQAPDTDLKGNPVHCLLPYCSLHLHLKVSENPYTSGNIASRDTAPSIIVASGNIGPELSDNDISMFVSSDAGNTWRQIFEEEHSVLYLDQGGVLVAIKHTSLPIRHLWLSFDEGKSWSKYSFTSLPLFVDGILGEPGEETLIMTVFGHFSHRSEWQLVKIDYKSIFDRRCAEEDYWTWQLHSQGEACIMGAKRIYRKRKSEKKCMQGKYAGAMTSEPCVCTDADFDCDYGYERHRNGQCLPAFWYNPSSLSKDCSLGQSYLNSTGYRKVVSNNCTDGVREQYTAKPQQCPGKAPQGLRIITSDGKLTAEQGHNVTFLVQLEEGDLQRSLIQVDFGDGTAVSYANLSSTEDGIKHTYQNVGIFRVTVLVENSLGSDNAVLYLHVTCPLEHVHLSLPFVTTKNKEVNATAVLWPSQVGTLTYVWWFGNNTEPLITLEGSITFTFSVEGMNTITVQVSAGNTILQDTKTIAVYEQFRSLRLSFSPNLDDYNPDIPEWRRDISRVVKRALVEATGISSKHILVAVLPGLPTSAELFILPYQDATGGNKRTEDLEQISEILIQKLNQNFVHFELKPGVRVLVHAAHLTAAPLVDLTPSHSGSAMLMLLSVVFVGLAVFVIYKFKRKIPGLNIYAQMQNEKDQEMVSPVSQRESIPNVPQSELMSPEQLVDEKLDVQPIEQPQATVQNPRKGNAAKVVWTEDFQKACGSPRGFKPRPGAEVFPQLLSPRAQKKSLPM

SEQ ID NO: 49 - protein, 1200 aa, Gallus gallus
  MISC_FEATURE (1)..(1200): proSorCS1
TDRGEKERWRIPGEQGGERGRGAGMDTEDAELQAPFDPALAGTKFSGWETRSWASEPEKAPGDSRPGAAAAPTGEYPQRGQAGGRRNSARRRRGRSPRGTAGPGGAAGREPGGSGAARFGLEELRLGSTTFALTGDSAHNQAMVHWSGQNSSVILILTKLYDYNLGSITESSLWRSTDYGTTYEKLNDKIGLKTILSYLYVCPTNKRKIMLLTDPEVESSLLISTDEGATYQKYRLNFYIHSLLFHPKQEDWILAYSQDQKLFSSVEFGRRWLLLHEGVAPNRFYWSMMVSGREPDLVHLEAKTVDGHAQYITCKMQNCSEASQNKPFPGYIDHNSLIVQDDYVFVQLTSGGRPHYYVSYRRNAFTPIKLPKYSLPKDMHVISTDESQVFAAVQEWNQNDTYNLYISDTRGVYFTLALENVKSSQGLDGNVMIDLYEVAGIKGMFLANKKIDNQVKTFITYNKGRDWNLLQAPDTDLKGNPVHCLLPYCSLHLHLKVSENPYTSGNIASRDTAPSIIVASGNIGPELSDNDISMFVSSDAGNTWRQIFEEEHSVLYLDQGGVLVAIKHTSLPIRHLWLSFDEGKSWSKYSFTSLPLFVDGILGEPGEETLIMTVFGHFSHRSEWQLVKIDYKSIFDRRCAEEDYWTWQLHSQGEACIMGAKRIYRKRKSEKKCMQGKYAGAMTSEPCVCTDADFDCDYGYERHRNGQCLPAFWYNPSSLSKDCSLGQSYLNSTGYRKVVSNNCTDGVREQYTAKPQQCPGKAPQGLRIITSDGKLTAEQGHNVTFLVQLEEGDLQRSLIQVDFGDGTAVSYANLSSTEDGIKHTYQNVGIFRVTVLVENSLGSDNAVLYLHVTCPLEHVHLSLPFVTTKNKEVNATAVLWPSQVGTLTYVWWFGNNTEPLITLEGSITFTFSVEGMNTITVQVSAGNTILQDTKTIAVYEQFRSLRLSFSPNLDDYNPDIPEWRRDISRVVKRALVEATGISSKHILVAVLPGLPTSAELFILPYQDATGGNKRTEDLEQISEILIQKLNQNFVHFELKPGVRVLVHAAHLTAAPLVDLTPSHSGSAMLMLLSVVFVGLAVFVIYKFKRKIPGLNIYAQMQNEKDQEMVSPVSQRESIPNVPQSELMSPEQLVDEKLDVQPIEQPQATVQNPRKGNAAKVVWTEDFQKACGSPRGFKPRPGAEVFPQLLSPRAQKKSLPM

SEQ ID NO: 50 - protein, 1121 aa, Gallus gallus
  MISC_FEATURE (1)..(1121): mature SorCS1
GQAGGRRNSARRRRGRSPRGTAGPGGAAGREPGGSGAARFGLEELRLGSTTFALTGDSAHNQAMVHWSGQNSSVILILTKLYDYNLGSITESSLWRSTDYGTTYEKLNDKIGLKTILSYLYVCPTNKRKIMLLTDPEVESSLLISTDEGATYQKYRLNFYIHSLLFHPKQEDWILAYSQDQKLFSSVEFGRRWLLLHEGVAPNRFYWSMMVSGREPDLVHLEAKTVDGHAQYITCKMQNCSEASQNKPFPGYIDHNSLIVQDDYVFVQLTSGGRPHYYVSYRRNAFTPIKLPKYSLPKDMHVISTDESQVFAAVQEWNQNDTYNLYISDTRGVYFTLALENVKSSQGLDGNVMIDLYEVAGIKGMFLANKKIDNQVKTFITYNKGRDWNLLQAPDTDLKGNPVHCLLPYCSLHLHLKVSENPYTSGNIASRDTAPSIIVASGNIGPELSDNDISMFVSSDAGNTWRQIFEEEHSVLYLDQGGVLVAIKHTSLPIRHLWLSFDEGKSWSKYSFTSLPLFVDGILGEPGEETLIMTVFGHFSHRSEWQLVKIDYKSIFDRRCAEEDYWTWQLHSQGEACIMGAKRIYRKRKSEKKCMQGKYAGAMTSEPCVCTDADFDCDYGYERHRNGQCLPAFWYNPSSLSKDCSLGQSYLNSTGYRKVVSNNCTDGVREQYTAKPQQCPGKAPQGLRIITSDGKLTAEQGHNVTFLVQLEEGDLQRSLIQVDFGDGTAVSYANLSSTEDGIKHTYQNVGIFRVTVLVENSLGSDNAVLYLHVTCPLEHVHLSLPFVTTKNKEVNATAVLWPSQVGTLTYVWWFGNNTEPLITLEGSITFTFSVEGMNTITVQVSAGNTILQDTKTIAVYEQFRSLRLSFSPNLDDYNPDIPEWRRDISRVVKRALVEATGISSKHILVAVLPGLPTSAELFILPYQDATGGNKRTEDLEQISEILIQKLNQNFVHFELKPGVRVLVHAAHLTAAPLVDLTPSHSGSAMLMLLSVVFVGLAVFVIYKFKRKIPGLNIYAQMQNEKDQEMVSPVSQRESIPNVPQSELMSPEQLVDEKLDVQPIEQPQATVQNPRKGNAAKVVWTEDFQKACGSPRGFKPRPGAEVFPQLLSPRAQKKSLPM

SEQ ID NO: 51 - protein, 986 aa, Gallus gallus
  MISC_FEATURE (1)..(986): soluble SorCS1
GQAGGRRNSARRRRGRSPRGTAGPGGAAGREPGGSGAARFGLEELRLGSTTFALTGDSAHNQAMVHWSGQNSSVILILTKLYDYNLGSITESSLWRSTDYGTTYEKLNDKIGLKTILSYLYVCPTNKRKIMLLTDPEVESSLLISTDEGATYQKYRLNFYIHSLLFHPKQEDWILAYSQDQKLFSSVEFGRRWLLLHEGVAPNRFYWSMMVSGREPDLVHLEAKTVDGHAQYITCKMQNCSEASQNKPFPGYIDHNSLIVQDDYVFVQLTSGGRPHYYVSYRRNAFTPIKLPKYSLPKDMHVISTDESQVFAAVQEWNQNDTYNLYISDTRGVYFTLALENVKSSQGLDGNVMIDLYEVAGIKGMFLANKKIDNQVKTFITYNKGRDWNLLQAPDTDLKGNPVHCLLPYCSLHLHLKVSENPYTSGNIASRDTAPSIIVASGNIGPELSDNDISMFVSSDAGNTWRQIFEEEHSVLYLDQGGVLVAIKHTSLPIRHLWLSFDEGKSWSKYSFTSLPLFVDGILGEPGEETLIMTVFGHFSHRSEWQLVKIDYKSIFDRRCAEEDYWTWQLHSQGEACIMGAKRIYRKRKSEKKCMQGKYAGAMTSEPCVCTDADFDCDYGYERHRNGQCLPAFWYNPSSLSKDCSLGQSYLNSTGYRKVVSNNCTDGVREQYTAKPQQCPGKAPQGLRIITSDGKLTAEQGHNVTFLVQLEEGDLQRSLIQVDFGDGTAVSYANLSSTEDGIKHTYQNVGIFRVTVLVENSLGSDNAVLYLHVTCPLEHVHLSLPFVTTKNKEVNATAVLWPSQVGTLTYVWWFGNNTEPLITLEGSITFTFSVEGMNTITVQVSAGNTILQDTKTIAVYEQFRSLRLSFSPNLDDYNPDIPEWRRDISRVVKRALVEATGISSKHILVAVLPGLPTSAELFILPYQDATGGNKRTEDLEQISEILIQKLNQNFVHFELKPGVRVLVHAAHLTAAPLVDLTPSHSG

SEQ ID NO: 52 - protein, 831 aa, Homo sapiens
  MISC_FEATURE (1)..(831): preproSortilin
MERPWGAADGLSRWPHGLGLLLLLQLLPPSTLSQDRLDAPPPPAAPLPRWSGPIGVSWGLRAAAAGGAFPRGGRWRRSAPGEDEECGRVRDFVAKLANNTHQHVFDDLRGSVSLSWVGDSTGVILVLTTFHVPLVIMTFGQSKLYRSEDYGKNFKDITDLINNTFIRTEFGMAIGPENSGKVVLTAEVSGGSRGGRIFRSSDFAKNFVQTDLPFHPLTQMMYSPQNSDYLLALSTENGLWVSKNFGGKWEEIHKAVCLAKWGSDNTIFFTTYANGSCKADLGALELWRTSDLGKSFKTIGVKIYSFGLGGRFLFASVMADKDTTRRIHVSTDQGDTWSMAQLPSVGQEQFYSILAANDDMVFMHVDEPGDTGFGTIFTSDDRGIVYSKSLDRHLYTTTGGETDFTNVTSLRGVYITSVLSEDNSIQTMITFDQGGRWTHLRKPENSECDATAKNKNECSLHIHASYSISQKLNVPMAPLSEPNAVGIVIAHGSVGDAISVMVPDVYISDDGGYSWTKMLEGPHYYTILDSGGIIVAIEHSSRPINVIKFSTDEGQCWQTYTFTRDPIYFTGLASEPGARSMNISIWGFTESFLTSQWVSYTIDFKDILERNCEEKDYTIWLAHSTDPEDYEDGCILGYKEQFLRLRKSSVCQNGRDYVVTKQPSICLCSLEDFLCDFGYYRPENDSKCVEQPELKGHDLEFCLYGREEHLTTNGYRKIPGDKCQGGVNPVREVKDLKKKCTSNFLSPEKQNSKSNSVPIILAIVGLMLVTVVAGVLIVKKYVCGGRFLVHRYSVLQQHAEANGVDGVDALDTASHTNKSGYHDDSDEDLLE

SEQ ID NO: 53 - protein, 2214 aa, Homo sapiens
  MISC_FEATURE (1)..(2214): preproSorLA
MATRSSRRESRLPFLFTLVALLPPGALCEVWTQRLHGGSAPLPQDRGFLVVQGDPRELRLWARGDARGASRADEKPLRRKRSAALQPEPIKVYGQVSLNDSHNQMVVHWAGEKSNVIVALARDSLALARPKSSDVYVSYDYGKSFKKISDKLNFGLGNRSEAVIAQFYHSPADNKRYIFADAYAQYLWITFDFCNTLQGFSIPFRAADLLLHSKASNLLLGFDRSHPNKQLWKSDDFGQTWIMIQEHVKSFSWGIDPYDKPNTIYIERHEPSGYSTVFRSTDFFQSRENQEVILEEVRDFQLRDKYMFATKVVHLLGSEQQSSVQLWVSFGRKPMRAAQFVTRHPINEYYIADASEDQVFVCVSHSNNRTNLYISEAEGLKFSLSLENVLYYSPGGAGSDTLVRYFANEPFADFHRVEGLQGVYIATLINGSMNEENMRSVITFDKGGTWEFLQAPAFTGYGEKINCELSQGCSLHLAQRLSQLLNLQLRRMPILSKESAPGLIIATGSVGKNLASKTNVYISSSAGARWREALPGPHYYTWGDHGGIITAIAQGMETNELKYSTNEGETWKTFIFSEKPVFVYGLLTEPGEKSTVFTIFGSNKENVHSWLILQVNATDALGVPCTENDYKLWSPSDERGNECLLGHKTVFKRRTPHATCFNGEDFDRPVVVSNCSCTREDYECDFGFKMSEDLSLEVCVPDPEFSGKSYSPPVPCPVGSTYRRTRGYRKISGDTCSGGDVEARLEGELVPCPLAEENEFILYAVRKSIYRYDLASGATEQLPLTGLRAAVALDFDYEHNCLYWSDLALDVIQRLCLNGSTGQEVIINSGLETVEALAFEPLSQLLYWVDAGFKKIEVANPDGDFRLTIVNSSVLDRPRALVLVPQEGVMFWTDWGDLKPGIYRSNMDGSAAYHLVSEDVKWPNGISVDDQWIYWTDAYLECIERITFSGQQRSVILDNLPHPYAIAVFKNEIYWDDWSQLSIFRASKYSGSQMEILANQLTGLMDMKIFYKGKNTGSNACVPRPCSLLCLPKANNSRSCRCPEDVSSSVLPSGDLMCDCPQGYQLKNNTCVKEENTCLRNQYRCSNGNCINSIWWCDFDNDCGDMSDERNCPTTICDLDTQFRCQESGTCIPLSYKCDLEDDCGDNSDESHCEMHQCRSDEYNCSSGMCIRSSWVCDGDNDCRDWSDEANCTAIYHTCEASNFQCRNGHCIPQRWACDGDTDCQDGSDEDPVNCEKKCNGFRCPNGTCIPSSKHCDGLRDCSDGSDEQHCEPLCTHFMDFVCKNRQQCLFHSMVCDGIIQCRDGSDEDAAFAGCSQDPEFHKVCDEFGFQCQNGVCISLIWKCDGMDDCGDYSDEANCENPTEAPNCSRYFQFRCENGHCIPNRWKCDRENDCGDWSDEKDCGDSHILPFSTPGPSTCLPNYYRCSSGTCVMDTWVCDGYRDCADGSDEEACPLLANVTAASTPTQLGRCDRFEFECHQPKTCIPNWKRCDGHQDCQDGRDEANCPTHSTLTCMSREFQCEDGEACIVLSERCDGFLDCSDESDEKACSDELTVYKVQNLQWTADFSGDVTLTWMRPKKMPSASCVYNVYYRVVGESIWKTLETHSNKTNTVLKVLKPDTTYQVKVQVQCLSKAHNTNDFVTLRTPEGLPDAPRNLQLSLPREAEGVIVGHWAPPIHTHGLIREYIVEYSRSGSKMWASQRAASNFTEIKNLLVNTLYTVRVAAVTSRGIGNWSDSKSITTIKGKVIPPPDIHIDSYGENYLSFTLTMESDIKVNGYVVNLFWAFDTHKQERRTLNFRGSILSHKVGNLTAHTSYEISAWAKTDLGDSPLAFEHVMTRGVRPPAPSLKAKAINQTAVECTWTGPRNVVYGIFYATSFLDLYRNPKSLTTSLHNKTVIVSKDEQYLFLVRVVVPYQGPSSDYVVVKMIPDSRLPPRHLHVVHTGKTSVVIKWESPYDSPDQDLLYAIAVKDLIRKTDRSYKVKSRNSTVEYTLNKLEPGGKYHIIVQLGNMSKDSSIKITTVSLSAPDALKIITENDHVLLFWKSLALKEKHFNESRGYEIHMFDSAMNITAYLGNTTDNFFKISNLKMGHNYTFTVQARCLFGNQICGEPAILLYDELGSGADASATQAARSTDVAAVVVPILFLILLSLGVGFAILYTKHRRLQSSFTAFANSHYSSRLGSAIFSSGDDLGEDDEDAPMITGFSDDVPMVIA

SEQ ID NO: 54 - protein, 1159 aa, Homo sapiens [sequence omitted]

SEQ ID NO: 55 - protein, 1222 aa, Homo sapiens
  MISC_FEATURE (1)..(1222): preproSorCS3
MEAARTERPAGRPGAPLVRTGLLLLSTWVLAGAEITWDATGGPGRPAAPASRPPALSPLSPRAVASQWPEELASARRAAVLGRRAGPELLPQQGGGRGGEMQVEAGGTSPAGERRGRGIPAPAKLGGARRSRRAQPPITQERGDAWATAPADGSRGSRPLAKGSREEVKAPRAGGSAAEDLRLPSTSFALTGDSAHNQAMVHWSGHNSSVILILTKLYDFNLGSVTESSLWRSTDYGTTYEKLNDKVGLKTVLSYLYVNPTNKRKIMLLSDPEMESSILISSDEGATYQKYRLTFYIQSLLFHPKQEDWVLAYSLDQKLYSSMDFGRRWQLMHERITPNRFYWSVAGLDKEADLVHMEVRTTDGYAHYLTCRIQECAETTRSGPFARSIDISSLVVQDEYIFIQVTTSGRASYYVSYRREAFAQIKLPKYSLPKDMHIISTDENQVFAAVQEWNQNDTYNLYISDTRGIYFTLAMENIKSSRGLMGNIIIELYEVAGIKGIFLANKKVDDQVKTYITYNKGRDWRLLQAPDVDLRGSPVHCLLPFCSLHLHLQLSENPYSSGRISSKETAPGLVVATGNIGPELSYTDIGVFISSDGGNTWRQIFDEEYNVWFLDWGGALVAMKHTPLPVRHLWVSFDEGHSWDKYGFTSVPLFVDGALVEAGMETHIMTVFGHFSLRSEWQLVKVDYKSIFSRHCTKEDYQTWHLLNQGEPCVMGERKIFKKRKPGAQCALGRDHSGSVVSEPCVCANWDFECDYGYERHGESQCVPAFWYNPASPSKDCSLGQSYLNSTGYRRIVSNNCTDGLREKYTAKAQMCPGKAPRGLHVVTTDGRLVAEQGHNATFIILMEEGDLQRTNIQLDFGDGIAVSYANFSPIEDGIKHVYKSAGIFQVTAYAENNLGSDTAVLFLHVVCPVEHVHLRVPFVAIRNKEVNISAVVWPSQLGTLTYFWWFGNSTKPLITLDSSISFTFLAEGTDTITVQVAAGNALIQDTKEIAVHEYFQSQLLSFSPNLDYHNPDIPEWRKDIGNVIKRALVKVTSVPEDQILIAVFPGLPTSAELFILPPKNLTERRKGNEGDLEQIVETLFNALNQNLVQFELKPGVQVIVYVTQLTLAPLVDSSAGHSSSAMLMLLSVVFVGLAVFLIYKFKRKIPWINIYAQVQHDKEQEMIGSVSQSENAPKITLSDFTEPEELLDKELDTRVIGGIATIANSESTKEIPNCTSV

SEQ ID NO: 56 - protein, 1189 aa, Homo sapiens
  MISC_FEATURE (1)..(1189): proSorCS3
EITWDATGGPGRPAAPASRPPALSPLSPRAVASQWPEELASARRAAVLGRRAGPELLPQQGGGRGGEMQVEAGGTSPAGERRGRGIPAPAKLGGARRSRRAQPPITQERGDAWATAPADGSRGSRPLAKGSREEVKAPRAGGSAAEDLRLPSTSFALTGDSAHNQAMVHWSGHNSSVILILTKLYDFNLGSVTESSLWRSTDYGTTYEKLNDKVGLKTVLSYLYVNPTNKRKIMLLSDPEMESSILISSDEGATYQKYRLTFYIQSLLFHPKQEDWVLAYSLDQKLYSSMDFGRRWQLMHERITPNRFYWSVAGLDKEADLVHMEVRTTDGYAHYLTCRIQECAETTRSGPFARSIDISSLVVQDEYIFIQVTTSGRASYYVSYRREAFAQIKLPKYSLPKDMHIISTDENQVFAAVQEWNQNDTYNLYISDTRGIYFTLAMENIKSSRGLMGNIIIELYEVAGIKGIFLANKKVDDQVKTYITYNKGRDWRLLQAPDVDLRGSPVHCLLPFCSLHLHLQLSENPYSSGRISSKETAPGLVVATGNIGPELSYTDIGVFISSDGGNTWRQIFDEEYNVWFLDWGGALVAMKHTPLPVRHLWVSFDEGHSWDKYGFTSVPLFVDGALVEAGMETHIMTVFGHFSLRSEWQLVKVDYKSIFSRHCTKEDYQTWHLLNQGEPCVMGERKIFKKRKPGAQCALGRDHSGSVVSEPCVCANWDFECDYGYERHGESQCVPAFWYNPASPSKDCSLGQSYLNSTGYRRIVSNNCTDGLREKYTAKAQMCPGKAPRGLHVVTTDGRLVAEQGHNATFIILMEEGDLQRTNIQLDFGDGIAVSYANFSPIEDGIKHVYKSAGIFQVTAYAENNLGSDTAVLFLHVVCPVEHVHLRVPFVAIRNKEVNISAVVWPSQLGTLTYFWWFGNSTKPLITLDSSISFTFLAEGTDTITVQVAAGNALIQDTKEIAVHEYFQSQLLSFSPNLDYHNPDIPEWRKDIGNVIKRALVKVTSVPEDQILIAVFPGLPTSAELFILPPKNLTERRKGNEGDLEQIVETLFNALNQNLVQFELKPGVQVIVYVTQLTLAPLVDSSAGHSSSAMLMLLSVVFVGLAVFLIYKFKRKIPWINIYAQVQHDKEQEMIGSVSQSENAPKITLSDFTEPEELLDKELDTRVIGGIATIANSESTKEIPNCTSV

SEQ ID NO: 57 - protein, 1089 aa, Homo sapiens
  MISC_FEATURE (1)..(1089): Mature SorCS3
AQPPITQERGDAWATAPADGSRGSRPLAKGSREEVKAPRAGGSAAEDLRLPSTSFALTGDSAHNQAMVHWSGHNSSVILILTKLYDFNLGSVTESSLWRSTDYGTTYEKLNDKVGLKTVLSYLYVNPTNKRKIMLLSDPEMESSILISSDEGATYQKYRLTFYIQSLLFHPKQEDWVLAYSLDQKLYSSMDFGRRWQLMHERITPNRFYWSVAGLDKEADLVHMEVRTTDGYAHYLTCRIQECAETTRSGPFARSIDISSLVVQDEYIFIQVTTSGRASYYVSYRREAFAQIKLPKYSLPKDMHIISTDENQVFAAVQEWNQNDTYNLYISDTRGIYFTLAMENIKSSRGLMGNIIIELYEVAGIKGIFLANKKVDDQVKTYITYNKGRDWRLLQAPDVDLRGSPVHCLLPFCSLHLHLQLSENPYSSGRISSKETAPGLVVATGNIGPELSYTDIGVFISSDGGNTWRQIFDEEYNVWFLDWGGALVAMKHTPLPVRHLWVSFDEGHSWDKYGFTSVPLFVDGALVEAGMETHIMTVFGHFSLRSEWQLVKVDYKSIFSRHCTKEDYQTWHLLNQGEPCVMGERKIFKKRKPGAQCALGRDHSGSVVSEPCVCANWDFECDYGYERHGESQCVPAFWYNPASPSKDCSLGQSYLNSTGYRRIVSNNCTDGLREKYTAKAQMCPGKAPRGLHVVTTDGRLVAEQGHNATFIILMEEGDLQRTNIQLDFGDGIAVSYANFSPIEDGIKHVYKSAGIFQVTAYAENNLGSDTAVLFLHVVCPVEHVHLRVPFVAIRNKEVNISAVVWPSQLGTLTYFWWFGNSTKPLITLDSSISFTFLAEGTDTITVQVAAGNALIQDTKEIAVHEYFQSQLLSFSPNLDYHNPDIPEWRKDIGNVIKRALVKVTSVPEDQILIAVFPGLPTSAELFILPPKNLTERRKGNEGDLEQIVETLFNALNQNLVQFELKPGVQVIVYVTQLTLAPLVDSSAGHSSSAMLMLLSVVFVGLAVFLIYKFKRKIPWINIYAQVQHDKEQEMIGSVSQSENAPKITLSDFTEPEELLDKELDTRVIGGIATIANSESTKEIPNCTSV

SEQ ID NO: 58 - protein, 1089 aa, Homo sapiens; identical to SEQ ID NO: 57
  MISC_FEATURE (1)..(1089): soluble preproSorCS3

SEQ ID NO: 59 - protein, 1091 aa, Homo sapiens
  MISC_FEATURE (1)..(1091): soluble proSorCS3
EITWDATGGPGRPAAPASRPPALSPLSPRAVASQWPEELASARRAAVLGRRAGPELLPQQGGGRGGEMQVEAGGTSPAGERRGRGIPAPAKLGGARRSRRAQPPITQERGDAWATAPADGSRGSRPLAKGSREEVKAPRAGGSAAEDLRLPSTSFALTGDSAHNQAMVHWSGHNSSVILILTKLYDFNLGSVTESSLWRSTDYGTTYEKLNDKVGLKTVLSYLYVNPTNKRKIMLLSDPEMESSILISSDEGATYQKYRLTFYIQSLLFHPKQEDWVLAYSLDQKLYSSMDFGRRWQLMHERITPNRFYWSVAGLDKEADLVHMEVRTTDGYAHYLTCRIQECAETTRSGPFARSIDISSLVVQDEYIFIQVTTSGRASYYVSYRREAFAQIKLPKYSLPKDMHIISTDENQVFAAVQEWNQNDTYNLYISDTRGIYFTLAMENIKSSRGLMGNIIIELYEVAGIKGIFLANKKVDDQVKTYITYNKGRDWRLLQAPDVDLRGSPVHCLLPFCSLHLHLQLSENPYSSGRISSKETAPGLVVATGNIGPELSYTDIGVFISSDGGNTWRQIFDEEYNVWFLDWGGALVAMKHTPLPVRHLWVSFDEGHSWDKYGFTSVPLFVDGALVEAGMETHIMTVFGHFSLRSEWQLVKVDYKSIFSRHCTKEDYQTWHLLNQGEPCVMGERKIFKKRKPGAQCALGRDHSGSVVSEPCVCANWDFECDYGYERHGESQCVPAFWYNPASPSKDCSLGQSYLNSTGYRRIVSNNCTDGLREKYTAKAQMCPGKAPRGLHVVTTDGRLVAEQGHNATFIILMEEGDLQRTNIQLDFGDGIAVSYANFSPIEDGIKHVYKSAGIFQVTAYAENNLGSDTAVLFLHVVCPVEHVHLRVPFVAIRNKEVNISAVVWPSQLGTLTYFWWFGNSTKPLITLDSSISFTFLAEGTDTITVQVAAGNALIQDTKEIAVHEYFQSQLLSFSPNLDYHNPDIPEWRKDIGNVIKRALVKVTSVPEDQILIAVFPGLPTSAELFILPPKNLTERRKGNEGDLEQIVETLFNALNQNLVQFELKPGVQVIVYVTQLTLAPLVDSSAGHSS

SEQ ID NO: 60 - protein, 991 aa, Homo sapiens
  MISC_FEATURE (1)..(991): Soluble mature SorCS3
AQPPITQERGDAWATAPADGSRGSRPLAKGSREEVKAPRAGGSAAEDLRLPSTSFALTGDSAHNQAMVHWSGHNSSVILILTKLYDFNLGSVTESSLWRSTDYGTTYEKLNDKVGLKTVLSYLYVNPTNKRKIMLLSDPEMESSILISSDEGATYQKYRLTFYIQSLLFHPKQEDWVLAYSLDQKLYSSMDFGRRWQLMHERITPNRFYWSVAGLDKEADLVHMEVRTTDGYAHYLTCRIQECAETTRSGPFARSIDISSLVVQDEYIFIQVTTSGRASYYVSYRREAFAQIKLPKYSLPKDMHIISTDENQVFAAVQEWNQNDTYNLYISDTRGIYFTLAMENIKSSRGLMGNIIIELYEVAGIKGIFLANKKVDDQVKTYITYNKGRDWRLLQAPDVDLRGSPVHCLLPFCSLHLHLQLSENPYSSGRISSKETAPGLVVATGNIGPELSYTDIGVFISSDGGNTWRQIFDEEYNVWFLDWGGALVAMKHTPLPVRHLWVSFDEGHSWDKYGFTSVPLFVDGALVEAGMETHIMTVFGHFSLRSEWQLVKVDYKSIFSRHCTKEDYQTWHLLNQGEPCVMGERKIFKKRKPGAQCALGRDHSGSVVSEPCVCANWDFECDYGYERHGESQCVPAFWYNPASPSKDCSLGQSYLNSTGYRRIVSNNCTDGLREKYTAKAQMCPGKAPRGLHVVTTDGRLVAEQGHNATFIILMEEGDLQRTNIQLDFGDGIAVSYANFSPIEDGIKHVYKSAGIFQVTAYAENNLGSDTAVLFLHVVCPVEHVHLRVPFVAIRNKEVNISAVVWPSQLGTLTYFWWFGNSTKPLITLDSSISFTFLAEGTDTITVQVAAGNALIQDTKEIAVHEYFQSQLLSFSPNLDYHNPDIPEWRKDIGNVIKRALVKVTSVPEDQILIAVFPGLPTSAELFILPPKNLTERRKGNEGDLEQIVETLFNALNQNLVQFELKPGVQVIVYVTQLTLAPLVDSSAGHSS

SEQ ID NO: 61 - protein, 1088 aa, Homo sapiens
  MISC_FEATURE (1)..(1088): proSorCS1B (variant)
SGADQEKAERGEGASRSPRGVLRDGGQQEPGTRERDPDKATRFRMEELRLTSTTFALTGDSAHNQAMVHWSGHNSSVILILTKLYDYNLGSITESSLWRSTDYGTTYEKLNDKVGLKTILSYLYVCPTNKRKIMLLTDPEIESSLLISSDEGATYQKYRLNFYIQSLLFHPKQEDWILAYSQDQKLYSSAEFGRRWQLIQEGVVPNRFYWSVMGSNKEPDLVHLEARTVDGHSHYLTCRMQNCTEANRNQPFPGYIDPDSLIVQDHYVFVQLTSGGRPHYYVSYRRNAFAQMKLPKYALPKDMHVISTDENQVFAAVQEWNQNDTYNLYISDTRGVYFTLALENVQSSRGPEGNIMIDLYEVAGIKGMFLANKKIDNQVKTFITYNKGRDWRLLQAPDTDLRGDPVHCLLPYCSLHLHLKVSENPYTSGIIASKDTAPSIIVASGNIGSELSDTDISMFVSSDAGNTWRQIFEEEHSVLYLDQGGVLVAMKHTSLPIRHLWLSFDEGRSWSKYSFTSIPLFVDGVLGEPGEETLIMTVFGHFSHRSEWQLVKVDYKSIFDRRCAEEDYRPWQLHSQGEACIMGAKRIYKKRKSERKCMQGKYAGAMESEPCVCTEADFDCDYGYERHSNGQCLPAFWFNPSSLSKDCSLGQSYLNSTGYRKVVSNNCTDGVREQYTAKPQKCPGKAPRGLRIVTADGKLTAEQGHNVTLMVQLEEGDVQRTLIQVDFGDGIAVSYVNLSSMEDGIKHVYQNVGIFRVTVQVDNSLGSDSAVLYLHVTCPLEHVHLSLPFVTTKNKEVNATAVLWPSQVGTLTYVWWYGNNTEPLITLEGSISFRFTSEGMNTITVQVSAGNAILQDTKTIAVYEEFRSLRLSFSPNLDDYNPDIPEWRRDIGRVIKKSLVEATGVPGQHILVAVLPGLPTTAELFVLPYQDPAGENKRSTDDLEQISELLIHTLNQNSVHFELKPGVRVLVHAAHLTAAPLVDLTPTHSGSAMLMLLSVVFVGLAVFVIYKFKRKIPGINVYAQMQNEKEQEMISPVSHSESRPNVPQTELRRPGQLIDEKVESQLIGSISIVAENQSTKEIPTYVNV

SEQ ID NO: 62 - protein, 990 aa, Homo sapiens; identical to SEQ ID NO: 15
  MISC_FEATURE (1)..(990): soluble proSorCS1B (variant)

SEQ ID NO: 63 - protein, 1069 aa, Homo sapiens
  MISC_FEATURE (1)..(1069): mature SorCS1B (variant)
GVLRDGGQQEPGTRERDPDKATRFRMEELRLTSTTFALTGDSAHNQAMVHWSGHNSSVILILTKLYDYNLGSITESSLWRSTDYGTTYEKLNDKVGLKTILSYLYVCPTNKRKIMLLTDPEIESSLLISSDEGATYQKYRLNFYIQSLLFHPKQEDWILAYSQDQKLYSSAEFGRRWQLIQEGVVPNRFYWSVMGSNKEPDLVHLEARTVDGHSHYLTCRMQNCTEANRNQPFPGYIDPDSLIVQDHYVFVQLTSGGRPHYYVSYRRNAFAQMKLPKYALPKDMHVISTDENQVFAAVQEWNQNDTYNLYISDTRGVYFTLALENVQSSRGPEGNIMIDLYEVAGIKGMFLANKKIDNQVKTFITYNKGRDWRLLQAPDTDLRGDPVHCLLPYCSLHLHLKVSENPYTSGIIASKDTAPSIIVASGNIGSELSDTDISMFVSSDAGNTWRQIFEEEHSVLYLDQGGVLVAMKHTSLPIRHLWLSFDEGRSWSKYSFTSIPLFVDGVLGEPGEETLIMTVFGHFSHRSEWQLVKVDYKSIFDRRCAEEDYRPWQLHSQGEACIMGAKRIYKKRKSERKCMQGKYAGAMESEPCVCTEADFDCDYGYERHSNGQCLPAFWFNPSSLSKDCSLGQSYLNSTGYRKVVSNNCTDGVREQYTAKPQKCPGKAPRGLRIVTADGKLTAEQGHNVTLMVQLEEGDVQRTLIQVDFGDGIAVSYVNLSSMEDGIKHVYQNVGIFRVTVQVDNSLGSDSAVLYLHVTCPLEHVHLSLPFVTTKNKEVNATAVLWPSQVGTLTYVWWYGNNTEPLITLEGSISFRFTSEGMNTITVQVSAGNAILQDTKTIAVYEEFRSLRLSFSPNLDDYNPDIPEWRRDIGRVIKKSLVEATGVPGQHILVAVLPGLPTTAELFVLPYQDPAGENKRSTDDLEQISELLIHTLNQNSVHFELKPGVRVLVHAAHLTAAPLVDLTPTHSGSAMLMLLSVVFVGLAVFVIYKFKRKIPGINVYAQMQNEKEQEMISPVSHSESRPNVPQTELRRPGQLIDEKVESQLIGSISIVAENQSTKEIPTYVNV

SEQ ID NO: 64 - protein, 971 aa, Homo sapiens
  MISC_FEATURE (1)..(971): soluble mature SorCS1B (variant)
GVLRDGGQQEPGTRERDPDKATRFRMEELRLTSTTFALTGDSAHNQAMVHWSGHNSSVILILTKLYDYNLGSITESSLWRSTDYGTTYEKLNDKVGLKTILSYLYVCPTNKRKIMLLTDPEIESSLLISSDEGATYQKYRLNFYIQSLLFHPKQEDWILAYSQDQKLYSSAEFGRRWQLIQEGVVPNRFYWSVMGSNKEPDLVHLEARTVDGHSHYLTCRMQNCTEANRNQPFPGYIDPDSLIVQDHYVFVQLTSGGRPHYYVSYRRNAFAQMKLPKYALPKDMHVISTDENQVFAAVQEWNQNDTYNLYISDTRGVYFTLALENVQSSRGPEGNIMIDLYEVAGIKGMFLANKKIDNQVKTFITYNKGRDWRLLQAPDTDLRGDPVHCLLPYCSLHLHLKVSENPYTSGIIASKDTAPSIIVASGNIGSELSDTDISMFVSSDAGNTWRQIFEEEHSVLYLDQGGVLVAMKHTSLPIRHLWLSFDEGRSWSKYSFTSIPLFVDGVLGEPGEETLIMTVFGHFSHRSEWQLVKVDYKSIFDRRCAEEDYRPWQLHSQGEACIMGAKRIYKKRKSERKCMQGKYAGAMESEPCVCTEADFDCDYGYERHSNGQCLPAFWFNPSSLSKDCSLGQSYLNSTGYRKVVSNNCTDGVREQYTAKPQKCPGKAPRGLRIVTADGKLTAEQGHNVTLMVQLEEGDVQRTLIQVDFGDGIAVSYVNLSSMEDGIKHVYQNVGIFRVTVQVDNSLGSDSAVLYLHVTCPLEHVHLSLPFVTTKNKEVNATAVLWPSQVGTLTYVWWYGNNTEPLITLEGSISFRFTSEGMNTITVQVSAGNAILQDTKTIAVYEEFRSLRLSFSPNLDDYNPDIPEWRRDIGRVIKKSLVEATGVPGQHILVAVLPGLPTTAELFVLPYQDPAGENKRSTDDLEQISELLIHTLNQNSVHFELKPGVRVLVHAAHLTAAPLVDLTPTHSG

SEQ ID NO: 65 - protein, 7 aa, Artificial Sequence
  Synthetic linker
SGGSGGS

SEQ ID NO: 66 - protein, 15 aa, Artificial Sequence
  Synthetic linker
GGSGGSGGSGGSGGG

SEQ ID NO: 67 - protein, 18 aa, Artificial Sequence
  Synthetic linker
GGSGGSGGSGGSGGSGGS

SEQ ID NO: 68 - protein, 15 aa, Artificial Sequence
  Synthetic linker
GGGGSGGGGSGGGGS

SEQ ID NO: 69 - protein, 8 aa, Artificial Sequence
  Synthetic linker
EFAGAAAV

1. An agent selected from the group consisting of:
a) an isolated polypeptide comprising:
i) the amino acid sequence of SEQ ID NOs: 15; or
ii) a biologically active sequence variant of the amino acid sequence of i) wherein the variant has at least 60% sequence identity to said SEQ ID NO: 15,
iii) a biologically active fragment of at least 15 contiguous amino acids of any one of i) through ii), said fragment having at least 60% sequence identity to SEQ ID NO: 15 in a range of overlap of at least 15 amino acids,
b) a nucleic acid sequence encoding a polypeptide as defined in a);
c) a vector comprising the nucleic acid molecule as defined in b),
d) an isolated host cell transformed or transduced with the nucleic acid of b) or the vector of c),
for use in a method for reducing appetite, and/or for treating obesity, and/or for promoting weight loss, and/or increasing metabolism, and/or increasing thermogenesis, and/or converting white fat into brown fat.

2. The agent according to claim 1 wherein the agent is a polypeptide, wherein the polypeptide is a biologically active sequence variant comprising an amino acid sequence selected from the group consisting of SEQ ID NOs: 15, 5, 1, 2, 3, 4, 6, 7, 8, 9, 10, 11, 12, 13, 14, 16, 17, 18, 19, 20, 21, 22, 23, 24, 25, 26, 27, 28, 29, 30, 31, 32, 33, 34, 35, 36, 37, 38, 39, 40, 41, 42, 43, 44, 45, 46, 47, 48, 49, 50, 51, 55, 56, 57, 58, 59, 60, 61, 62, 63 and 64.

3. The agent according to claim 1 wherein the agent is a polypeptide, wherein the polypeptide is a biologically active sequence variant having an amino acid sequence selected from the group consisting of SEQ ID NOs: 15, 5, 1, 2, 3, 4, 6, 7, 8, 9, 10, 11, 12, 13, 14, 16, 17, 18, 19, 20, 21, 22, 23, 24, 25, 26, 27, 28, 29, 30, 31, 32, 33, 34, 35, 36, 37, 38, 39, 40, 41, 42, 43, 44, 45, 46, 47, 48, 49, 50, 51, 55, 56, 57, 58, 59, 60, 61, 62, 63 and 64.

4. The agent according to claim 1, wherein the polypeptide is a naturally occurring allelic variant of a sequence selected from the group consisting of SEQ ID NOs: 15, 5, 1, 2, 3, 4, 6, 7, 8, 9, 10, 11, 12, 13, 14, 16, 17, 18, 19, 20, 21, 22, 23, 24, 25, 26, 27, 28, 29, 30, 31, 32, 33, 34, 35, 36, 37, 38, 39, 40, 41, 42, 43, 44, 45, 46, 47, 48, 49, 50, 51, 55, 56, 57, 58, 59, 60, 61, 62, 63 and 64.

5. The agent according to claim 1, wherein the polypeptide comprises an amino acid sequence of a soluble SorCS1 selected from the group consisting of: SEQ ID NOs: 15, 5, 63, 62, 21, 27, 33, 37, 39, 43, 47, 51.

6. The agent according to any one of the preceding claims, wherein the polypeptide is a variant polypeptide described therein, wherein any amino acid specified in the selected sequence is altered to provide a conservative substitution, with the proviso that no more than 200 amino acids are so altered.

7. The agent according to any one of the preceding claims, wherein the polypeptide is a variant polypeptide described therein, wherein any amino acid specified in the selected sequence is altered to provide a conservative substitution, with the proviso that no more than 100 amino acids are so altered.

8. The agent according to any one of the preceding claims, wherein the polypeptide is a variant polypeptide described therein, wherein any amino acid specified in the selected sequence is altered to provide a conservative substitution, with the proviso that no more than 50 amino acids are so altered.

9. The agent according to any one of the preceding claims, wherein the polypeptide is a variant polypeptide described therein, wherein any amino acid specified in the selected sequence is altered to provide a conservative substitution, with the proviso that no more than 25 amino acids are so altered.

10. The agent according to any one of the preceding claims, wherein said polypeptide has at least 65%, more preferably at least 70%, more preferably at least 75%, preferably at least 80%, more preferably at least 85%, more preferably at least 90%, more preferably at least 91%, more preferably at least 92%, more preferably at least 93%, more preferably at least 94%, more preferably at least 95%, more preferably at least 96%, more preferably at least 97%, more preferably at least 98%, more preferably at least 99% sequence identity to an amino acid sequence selected from the group consisting of SEQ ID NOs: 15, 5, 1, 2, 3, 4, 6, 7, 8, 9, 10, 11, 12, 13, 14, 16, 17, 18, 19, 20, 21, 22, 23, 24, 25, 26, 27, 28, 29, 30, 31, 32, 33, 34, 35, 36, 37, 38, 39, 40, 41, 42, 43, 44, 45, 46, 47, 48, 49, 50, 51, 55, 56, 57, 58, 59, 60, 61, 62, 63 and 64.

11. The agent according to any one of the preceding claims, wherein said agent is a polypeptide, wherein the polypeptide is selected from the group consisting of SEQ ID NOs: 1, 2, 3, 4, 6, 7, 8, 9, 11, 12, 13, 14, 61 and 62.

12. The agent according to any one of the preceding claims, wherein the polypeptide is selected from the group consisting of SEQ ID NOs: 16, 17, 18, 19, 20, 22, 26, 28, 29, 30, 31 and 32.

13. The agent according to any one of the preceding claims, wherein the agent is a polypeptide selected from the group consisting of SEQ ID NOs: 61, 62, 63 and 64.

14. The agent according to any one of the preceding claims, wherein the agent is a polypeptide selected from the group consisting of SEQ ID NOs: 55, 56, 57, 58, 59 and 60.

15. The agent according to any one of the preceding claims, wherein the agent is a polypeptide selected from the group consisting of SEQ ID NOs: 62 and 64.

16. The agent according to claim 1, wherein the agent is a biologically active fragment, wherein the fragment comprises less than 500 contiguous amino acid residues, such as less than 450 contiguous amino acid residues, for example less than 400 contiguous amino acid residues, such as less than 350 contiguous amino acid residues, for example less than 300 contiguous amino acid residues, for example less than 250 contiguous amino acid residues, such as less than 240 contiguous amino acid residues, for example less than 225 contiguous amino acid residues, such as less than 200 contiguous amino acid residues, for example less than 180 contiguous amino acid residues, such as less than 160 contiguous amino acid residues, for example less than 150 contiguous amino acid residues, such as less than 140 contiguous amino acid residues, for example less than 130 contiguous amino acid residues, such as less than 120 contiguous amino acid residues, for example less than 110 contiguous amino acid residues, such as less than 100 contiguous amino acid residues, for example less than 90 contiguous amino acid residues, such as less than 85 contiguous amino acid residues, for example less than 80 contiguous amino acid residues, such as less than 75 contiguous amino acid residues, for example less than 70 contiguous amino acid residues, such as less than 65 contiguous amino acid residues, for example less than 60 contiguous amino acid residues, such as less than 55 contiguous amino acid residues, for example less than 50 contiguous amino acid residues, such as less than 45 contiguous amino acid residues, for example less than 40 contiguous amino acid residues, such as 35 contiguous amino acid residues, for example 30 contiguous amino acid residues, such as 25 contiguous amino acid residues, such as 20 contiguous amino acid residues, for example 15 contiguous amino acid residues of an any one of the amino acid sequences selected from the group consisting of SEQ ID NOs: 1, 2, 3, 4, 5, 6, 7, 8, 9, 10, 11, 12, 13, 14, 15, 16, 17, 18, 19, 20, 21, 22, 23, 24, 25, 26, 27, 28, 29, 30, 31, 32, 33, 34, 35, 36, 37, 38, 39, 40, 41, 42, 43, 44, 45, 46, 47, 48, 49, 50, 51, 52, 53, 54, 55, 56, 57, 58, 59, 60, 61, 62, 63 and 64.

17. The agent according to claim 1, wherein the agent is a biologically active fragment, wherein the fragment comprises at least 15 contiguous amino acid residues, such as more than 20 contiguous amino acid residues, for example more than 25 contiguous amino acid residues, for example more than 50 contiguous amino acid residues, such as more than 75 contiguous amino acid residues, for example more than 100 contiguous amino acid residues, such as more than 125 contiguous amino acid residues, for example more than 150 contiguous amino acid residues, such as more than 175 contiguous amino acid residues, for example more than 200 contiguous amino acid residues, such as more than 225 contiguous amino acid residues, for example more than 250 contiguous amino acid residues, such as more than 275 contiguous amino acid residues, for example more than 300 contiguous amino acid residues, such as more than 325 contiguous amino acid residues, for example more than 350 contiguous amino acid residues, such as more than 375 contiguous amino acid residues, for example more than 400 contiguous amino acid residues, such as more than 425 contiguous amino acid residues, for example more than 450 contiguous amino acid residues, such as more than 475 contiguous amino acid residues, for example more than 500 contiguous amino acid residues, such as more than 525 contiguous amino acid residues, for example more than 550 contiguous amino acid residues, such as more than 575 contiguous amino acid residues, for example more than 600 contiguous amino acid residues, such as more than 625 contiguous amino acid residues, for example more than 650 contiguous amino acid residues, such as more than 675 contiguous amino acid residues, such as more than 700 contiguous amino acid residues of any one of the amino acid sequences selected from the group consisting of SEQ ID NOs: 1, 2, 3, 4, 5, 6, 7, 8, 9, 10, 11, 12, 13, 14, 15, 16, 17, 18, 19, 20, 21, 22, 23, 24, 25, 26, 27, 28, 29, 30, 31, 32, 33, 34, 35, 36, 37, 38, 39, 40, 41, 42, 43, 44, 45, 46, 47, 48, 49, 50, 51, 52, 53, 54, 55, 56, 57, 58, 59, 60, 61, 62, 63 and 64.

18. The agent according to any one of the preceding claims wherein the polypeptide is glycosylated.

19. The agent according to claim 18, wherein the polypeptide is N-glycosylated in one or more asparagin amino acid residues corresponding to amino acid positions 184, 352, 433, 765, 776, 816, 847, 908 and 929 of SEQ ID NO: 1.

20. The agent according to any one of the preceding claims, wherein the polypeptide comprises one of more of the following sequences:
SEQ ID NO: 1 aa 103-124
SEQ ID NO: 1 aa 125-143
SEQ ID NO: 1 aa 144-162
SEQ ID NO: 1 aa 197-218
SEQ ID NO: 1 aa 391-409
SEQ ID NO: 1 aa 661-684
SEQ ID NO: 1 aa 763-783
SEQ ID NO: 1 aa 859-876.

21. The polypeptide of claim 1, wherein the signal peptide has been replaced by a heterologous signal peptide.

22. The agent according to any one of the preceding claims, wherein the polypeptide is capable of forming at least one intramolecular cystin bridge.

23. The agent according any one of the preceding claims, comprising a dimer of said polypeptide linked through at least one intermolecular cystin bridge.

24. The agent according to any one of the preceding claims, wherein said polypeptide further comprises an affinity tag, such as a polyhis tag, a GST tag, a HA tag, a Flag tag, a C-myc tag, a HSV tag, a V5 tag, a maltose binding protein tag, a cellulose binding domain tag.

25. The agent according to claim 1, wherein the vector further comprises a promoter operably linked to the nucleic acid sequence.

26. The agent according to claim 25, wherein the promoter is selected from the group consisting of: CMV, human UbiC, RSV, Tet-regulatable promoter, Mo-MLV-LTR, Mx1, EF-1 alpha, PDGF beta and CaMK II.

27. The agent according to claim 1, wherein the vector is selected from the group consisting of vectors derived from the Retroviridae family including lentivirus, HIV, SIV, FIV, EAIV, CIV.

28. The agent according to claim 1, wherein the vector is selected from the group consisting of adeno associated virus, adenovirus, alphavirus, baculovirus, HSV, coronavirus, Bovine papilloma virus, Mo-MLV.

29. The agent according to claim 1, wherein the vector is adeno associated virus (AAV).

30. The agent according to claim 1, wherein the host cell is selected from the group consisting of Saccharomyces cerevisiae, E. coli, Aspergillus and insect cells such as Sf9 insect cells.

31. The agent according to claim 1, wherein the host cell is selected from the group consisting of mammalian cells selected from the group consisting of human, feline, porcine, simian, canine, murine and rat cells.

32. The agent according to claim 31 wherein said mammalian cell is selected from the group consisting of muscle cells, hepatocytes, adipocytes and cells of the pancreas such as a cells, 13 cells and 8 cells.

33. The agent according to claim 1, wherein said host cell is selected from the group consisting of CHO, CHO-K1, HEI193T, HEK293, COS, HiB5, RN33b and BHK cells.

34. The agent of claim 1, wherein said subject does not suffer from insulin resistance and/or diabetes mellitus type 2.

35. The agent according to any one of the preceding claims, wherein the agent is chemically modified in order to increase its half-life when administered to a patient, in particular its plasma half-life.

36. The agent according to any one of the preceding claims, wherein the agent is chemically modified in order to increase its half-life when administered to a patient, in particular its plasma half-life.

37. The agent according to any one of the preceding claims, wherein said agent further comprises a moiety conjugated to said agent, thus generating a moiety-conjugated agent

38. The agent according to claim 37, wherein the moiety-conjugated agent has a plasma and/or serum half-life being longer than the plasma and/or serum half-life of the non-moiety conjugated agent.

39. The agent according to claim 37, wherein the moiety facilitates transport across the blood brain barrier.

40. The agent according to claim 37, wherein the moiety is an antibody from a camelid species such as a recombinant or native single-chain antibody from dromedaries, camels, llamas, alpacas, vicuñas, or guanacos.

41. The agent according to any one of claims 37 to 40, wherein the moiety conjugated to the agent is one or more type of moieties selected from the group consisting of albumin, fatty acids, polyethylene glycol (PEG), acylation groups, antibodies and antibody fragments.

42. The agent according to any one of claims 37 to 41, wherein the agent and the moiety are conjugated to each-other by a linker.

43. The agent according to any one of claims 37 to 41, wherein the more than one moiety is conjugated to the agent.

44. The agent according to any one of claims 42 and 43, wherein the linker is a peptide having an amino acid sequence selected from the group consisting of SEQ ID NO: 65, 66, 67, 68 and 69.

45. A pharmaceutical composition comprising the agent of any one of the preceding claims.

46. The pharmaceutical composition according to claim 45 further comprising a pharmaceutically acceptable carrier.

47. The pharmaceutical composition according to any one of claims 45 and 46 wherein the pH of the composition is between pH 4 and pH 10.

48. The pharmaceutical composition according to any one of claims 45 to 47 wherein the composition is formulated for parenteral administration.

49. The pharmaceutical composition according to any one of claims 45 to 47 wherein the composition is formulated for oral administration.

50. The pharmaceutical composition according to claim 48 wherein the parenteral administration is by injection.

51. The pharmaceutical composition according to any one of claims 48 and 49, wherein the administration is intravenous, intramuscular, intraspinal, intraperitoneal, subcutaneous, a bolus or a continuous administration.

52. The pharmaceutical composition according to any one of claims 45 to 51, wherein the administration occurs at intervals of 30 minutes to 24 hours, such as at intervals of 1 to 6 hours, such as three times a day.

53. The pharmaceutical composition according to any one of claims 45 to 52, wherein the duration of the treatment is from 6 to 72 hours.

54. The pharmaceutical composition according to any one of claims 45 to 52, wherein the duration of the treatment is from 24 hours to 7 days.

55. The pharmaceutical composition according to any one of claims 45 to 52, wherein the duration of the treatment is from 4 days to 150 days.

56. The pharmaceutical composition according to any one of claims 45 to 52, wherein the duration of the treatment is lifelong.

57. The pharmaceutical composition according to any one of claims 35 to 43, wherein the dosage of the active ingredient is between 10 μg to 500 mg per kg body mass, such as from 50 μg to 250 mg per kg body mass.

58. A kit comprising the pharmaceutical composition according to any one of claims 45 to 57, and instructions for use.

59. Use of an agent selected from the group consisting of:
a) an isolated polypeptide comprising:
i) the amino acid sequence of SEQ ID NOs: 15; or
ii) a biologically active sequence variant of the amino acid sequence of i) wherein the variant has at least 60% sequence identity to said SEQ ID NO: 15,
iii) a biologically active fragment of at least 15 contiguous amino acids of any one of i) through ii), said fragment having at least 60% sequence identity to SEQ ID NO: 15 in a range of overlap of at least 15 amino acids,
b) a nucleic acid sequence encoding a polypeptide as defined in a);
c) a vector comprising the nucleic acid molecule as defined in b),
d) an isolated host cell transformed or transduced with the nucleic acid of b) or the vector of c),
for the preparation of a medicament for reduction of appetite, and/or for promoting weight loss, and/or increasing metabolism, and/or increasing thermogenesis, and/or converting white fat into brown fat.

60. A method for reducing appetite, and/or for promoting weight loss, and/or for treating obesity, and/or for increasing metabolism, and/or for increasing thermogenesis, and/or for converting white fat into brown fat, the method comprising administering to an individual in need thereof a therapeutically effective amount of an agent selected from the group consisting of:
a) an isolated polypeptide comprising:
i) the amino acid sequence of SEQ ID NOs: 15; or
ii) a biologically active sequence variant of the amino acid sequence of i) wherein the variant has at least 60% sequence identity to said SEQ ID NO: 15,
iii) a biologically active fragment of at least 15 contiguous amino acids of any one of i) through ii), said fragment having at least 60% sequence identity to SEQ ID NO: 15 in a range of overlap of at least 15 amino acids,
b) a nucleic acid sequence encoding a polypeptide as defined in a);
c) a vector comprising the nucleic acid molecule as defined in b),
d) an isolated host cell transformed or transduced with the nucleic acid of b) or the vector of c).

61. A method for treating obesity the method comprising administering to an individual in need thereof a therapeutically effective amount of an agent selected from the group consisting of:
a) an isolated polypeptide comprising:
i) the amino acid sequence of SEQ ID NOs: 15; or
ii) a biologically active sequence variant of the amino acid sequence of i) wherein the variant has at least 60% sequence identity to said SEQ ID NO: 15,
iii) a biologically active fragment of at least 15 contiguous amino acids of any one of i) through ii), said fragment having at least 60% sequence identity to SEQ ID NO: 15 in a range of overlap of at least 15 amino acids,
b) a nucleic acid sequence encoding a polypeptide as defined in a);
c) a vector comprising the nucleic acid molecule as defined in b),
d) an isolated host cell transformed or transduced with the nucleic acid of b) or the vector of c).

62. A method for increasing metabolism, the method comprising administering to an individual in need thereof a therapeutically effective amount of an agent selected from the group consisting of:
a) an isolated polypeptide comprising:
i) the amino acid sequence of SEQ ID NOs: 15; or
ii) a biologically active sequence variant of the amino acid sequence of i) wherein the variant has at least 60% sequence identity to said SEQ ID NO: 15,
iii) a biologically active fragment of at least 15 contiguous amino acids of any one of i) through ii), said fragment having at least 60% sequence identity to SEQ ID NO: 15 in a range of overlap of at least 15 amino acids,
b) a nucleic acid sequence encoding a polypeptide as defined in a);
c) a vector comprising the nucleic acid molecule as defined in b),
d) an isolated host cell transformed or transduced with the nucleic acid of b) or the vector of c).

63. A method for increasing thermogenesis in a mammal, the method comprising administering to the mammal a therapeutically effective amount of an agent selected from the group consisting of:
a) an isolated polypeptide comprising:
i) the amino acid sequence of SEQ ID NOs: 15; or
ii) a biologically active sequence variant of the amino acid sequence of i) wherein the variant has at least 60% sequence identity to said SEQ ID NO: 15,
iii) a biologically active fragment of at least 15 contiguous amino acids of any one of i) through ii), said fragment having at least 60% sequence identity to SEQ ID NO: 15 in a range of overlap of at least 15 amino acids,
b) a nucleic acid sequence encoding a polypeptide as defined in a);
c) a vector comprising the nucleic acid molecule as defined in b),
d) an isolated host cell transformed or transduced with the nucleic acid of b) or the vector of c).

64. An in vivo method for converting white fat into brown fat, the method comprising administering to a mammal a therapeutically effective amount of an agent selected from the group consisting of:
a) an isolated polypeptide comprising:
i) the amino acid sequence of SEQ ID NOs: 15; or
ii) a biologically active sequence variant of the amino acid sequence of i) wherein the variant has at least 60% sequence identity to said SEQ ID NO: 15,
iii) a biologically active fragment of at least 15 contiguous amino acids of any one of i) through ii), said fragment having at least 60% sequence identity to SEQ ID NO: 15 in a range of overlap of at least 15 amino acids,
b) a nucleic acid sequence encoding a polypeptide as defined in a);
c) a vector comprising the nucleic acid molecule as defined in b),
d) an isolated host cell transformed or transduced with the nucleic acid of b) or the vector of c).

65. An in vitro method for converting white fat into brown fat, the method comprising contacting a cell with an effective amount of an agent selected from the group consisting of:
a) an isolated polypeptide comprising:
i) the amino acid sequence of SEQ ID NOs: 15; or
ii) a biologically active sequence variant of the amino acid sequence of i) wherein the variant has at least 60% sequence identity to said SEQ ID NO: 15,
iii) a biologically active fragment of at least 15 contiguous amino acids of any one of i) through ii), said fragment having at least 60% sequence identity to SEQ ID NO: 15 in a range of overlap of at least 15 amino acids,
b) a nucleic acid sequence encoding a polypeptide as defined in a);
c) a vector comprising the nucleic acid molecule as defined in b),
d) an isolated host cell transformed or transduced with the nucleic acid of b) or the vector of c).
